(19) United States
(12) Patent Application Publication
(10) Pub. No.: US 2021/0087280 A1
(43) Pub. Date: Mar. 25, 2021

(54) ANTI-FRIZZLED ANTIBODIES AND METHODS OF USE

(71) Applicant: Surrozen, Inc., South San Francisco, CA (US)

(72) Inventors: Yang LI, Mountain View, CA (US); Tom Zhiye YUAN, Unity City, CA (US); Aaron Ken SATO, Burlingame, CA (US); Wen-Chen YEH, Belmont, CA (US); Chenggang LU, South San Francisco, CA (US); Parthasarathy SAMPATHKUMAR, South San Francisco, CA (US); Claudia Yvonne JANDA, South San Francisco, CA (US)

(21) Appl. No.: 16/954,482

(22) PCT Filed: Dec. 19, 2018
(86) PCT No.: PCT/US2018/066618

§ 371 Date: Jun. 16, 2020

Related U.S. Application Data
(60) Provisional application No. 62/607,877, filed on Dec. 19, 2017.
(60) Provisional application No. 62/680,508, filed on Jun. 4, 2018.

(51) Int. Cl. C07K 16/28

(52) U.S. Cl. CPC C07K 16/2863; C07K 2317/24; C07K 2319/00; C07K 2317/565; C07K 2317/55; C07K 2317/569; C07K 2317/92

(57) ABSTRACT

The present invention provides anti-Fzd monoclonal antibodies and related compositions, which may be used in any of a variety of therapeutic methods for the treatment of diseases.

### CROSS REFERENCE TO RELATED APPLICATIONS

[0001] This application claims priority to U.S. Provisional Application No. 62/607,877, filed Dec. 19, 2017, and U.S. Provisional Application No. 62/680,508, filed Jun. 4, 2018, both of which are incorporated by reference herein in their entireties.

### STATEMENT REGARDING SEQUENCE LISTING

[0002] The Sequence Listing associated with this application is provided in text format in lieu of a paper copy, and is hereby incorporated by reference into the specification. The name of the text file containing the Sequence Listing is SRZN_004_02WO_ST25.txt. The text file is 527 KB, was created on Dec. 19, 2018, and is being submitted electronically via EFS-Web.

### BACKGROUND

### Technical Field

[0003] The present invention relates generally to anti-Frizzled antibodies and antigen-binding fragments thereof, compositions, and methods of using the same. Such antibodies are useful, for example, in modulating Wnt signaling pathways.

### Description of the Related Art

[0004] Wnt (“Wingless-related integration site” or “Wingless and Int-1” or “Wingless-Int”) ligands and their signals play key roles in the control of development, homeostasis and regeneration of many essential organs and tissues, including bone, liver, skin, stomach, intestine, kidney, central nervous system, mammary gland, taste bud, ovary, cochlea and many other tissues (reviewed, e.g., by Clevers, Loh, and Nusse, 2014; 346:1248012). Modulation of Wnt signaling pathways has potential for treatment of degenerative diseases and tissue injuries.

[0005] One of the challenges for modulating Wnt signaling as a therapeutic is the existence of multiple Wnt ligands and Wnt receptors, Frizzled 1-10 (Fzd1-10), with many tissues expressing multiple and overlapping Fzds. Canonical Wnt signals also involve Low-density lipoprotein (LDL) receptor-related protein 5 (LRP5) or Low-density lipoprotein (LDL) receptor-related protein 6 (LRP6) as co-receptors, which are broadly expressed in various tissues, in addition to Fzds. Accordingly, there is clearly a need in the art for binding moieties, such as antibodies, that specifically bind to one or more Fzd, LRP5, or LRP6. The present invention addresses this need.

### BRIEF SUMMARY

[0006] In various embodiments, the present invention provides anti-Fzd antibodies and antigen-binding fragments thereof and related methods of use.

[0007] In one embodiment, the disclosure provides an isolated antibody, or an antigen-binding fragment thereof, that binds to one or more Frizzled receptor, comprising a sequence comprising: (i) CDRH1, CDRH2 and CDRH3 sequences set forth for any of the antibodies of Table 1A; and/or (ii) CDRL1, CDRL2 and CDRL3 sequences set forth for any of the antibodies of Table 1A, or a variant of said antibody, or antigen-binding fragment thereof, comprising one or more amino acid modifications, wherein said variant comprises less than 8 amino acid substitutions in said CDR sequences. In particular embodiments, the antibody or antigen-binding fragment thereof comprises a heavy chain variable region comprising an amino acid sequence having at least 90% identity to the amino acid sequence set forth in any of SEQ ID NOs:1-37, 66 or 68 or a heavy chain variable region comprising the amino acid sequence set forth in any of SEQ ID NOs:1-37, 66 or 68. In particular embodiments, the antibody, or antigen-binding fragment thereof, comprises a light chain variable region comprising an amino acid sequence having at least 90% identity to the amino acid sequence set forth in any of SEQ ID NOs:38-65, 67 or 69 or a light chain variable region comprising the amino acid sequence set forth in any of SEQ ID NOs:38-65, 67 or 69.

[0008] In particular embodiments, any of the antibodies, or antigen-binding fragments thereof, are humanized. In certain embodiments, any of the antibodies, or antigen-binding fragments thereof, are a single chain antibody, a scFv, a univalent antibody lacking a hinge region, a VHH or single domain antibody (sdAb), or a minibody. In particular embodiments, any of the antibodies, or antigen-binding fragments thereof, are a Fab or a Fab′ fragment.

[0009] In certain embodiments, any of the antibodies, or antigen-binding fragments thereof, are a fusion protein. In certain embodiments, the antibody, or antigen-binding fragment thereof, is fused to a polypeptide sequence that binds LRP5 or LRP6. In certain embodiments, the polypeptide sequence that binds LRP5 or LRP6 is an antibody, or an antigen-binding fragment thereof, that binds to LRP5 or LRP6.

[0010] In particular embodiments of any of the antibodies, or antigen-binding fragments thereof, the antibody, or antigen-binding fragment thereof, binds to one or more of Frizzled 1 (Fzd1), Frizzled 2 (Fzd2), Frizzled 3 (Fzd3), Frizzled 4 (Fzd4), Frizzled 5 (Fzd5), Frizzled 6 (Fzd6), Frizzled 7 (Fzd7), Frizzled 8 (Fzd8), Frizzled 9 (Fzd9), and Frizzled 10 (Fzd10). In certain embodiments, any of the antibodies, or antigen-binding fragments thereof, bind to two or more of Frizzled 1 (Fzd1), Frizzled 2 (Fzd2), Frizzled 3 (Fzd3), Frizzled 4 (Fzd4), Frizzled 5 (Fzd5), Frizzled 6 (Fzd6), Frizzled 7 (Fzd7), Frizzled 8 (Fzd8), Frizzled 9 (Fzd9), and Frizzled 10 (Fzd10). In certain embodiments, any of the antibodies, or antigen-binding fragments thereof, bind to: (i) Fzd1, Fzd2, Fzd7 and Fzd9; (ii) Fzd1, Fzd2 and Fzd7; (iii) Fzd5 and Fzd8; (iv) Fzd5, Fzd7 and Fzd8; (v) Fzd1, Fzd4, Fzd5 and Fzd8; (vi) Fzd1, Fzd2, Fzd5, Fzd7 and Fzd8; (vii) Fzd4 and Fzd9; (viii) Fzd9 and Fzd10; (ix) Fzd5, Fzd8 and Fzd10; (x) Fzd4, Fzd5 and Fzd8; (xi) Fzd1, Fzd5, Fzd7 and Fzd8 or (xii) Fzd1, Fzd2, Fzd 4, Fzd5, Fzd7 and Fzd 8.

[0011] In a related embodiment, the disclosure provides an isolated antibody, or an antigen-binding fragment thereof, that competes with any of the antibodies disclosed herein for binding to a human Fzd receptor.

[0012] In particular embodiments, any of the antibodies, or antigen-binding fragments thereof, bind to the Fzd with a KD of 50 μM or lower.

[0013] In particular embodiments, any of the antibodies, or antigen-binding fragments thereof, modulate a Wnt signaling pathway in a cell, optionally a mammalian cell. In particular embodiments, any of the antibodies, or antigen-binding fragments thereof increase signaling via a Wnt signaling pathway in the cell. In particular embodiments, any of the antibodies, or antigen-binding fragments thereof decrease signaling via a Wnt signaling pathway in the cell. In certain embodiments, the Wnt signaling pathway is a canonical Wnt signaling pathway or a non-canonical Wnt signaling pathway.

[0014] In a further related embodiment, the present disclosure provides an isolated polynucleotide encoding an antibody, or antigen-binding fragment thereof, disclosed herein. In certain embodiments, the present disclosure provides an expression vector comprising the isolated polynucleotide and an isolated host cell comprising the expression vector.

[0015] In another embodiment, the present disclosure provides a pharmaceutical composition comprising a physiologically acceptable excipient, diluent, or carrier, and a therapeutically effective amount of the isolated antibody, or antigen-binding fragment thereof, disclosed herein.

[0016] In a further embodiment, the present disclosure provides a method for agonizing a Wnt signaling pathway in a cell, comprising contacting the cell with an isolated antibody, or antigen-binding fragment thereof, disclosed herein that increases Wnt signaling. In particular embodiments, the antibody, or antigen-binding fragment thereof, is a fusion protein comprising a polypeptide sequence that binds LRP5 or LRP6.

[0017] In another embodiment, the present disclosure provides a method for inhibiting a Wnt signaling pathway in a cell, comprising contacting the cell with the isolated antibody, or antigen-binding fragment thereof, disclosed herein the inhibits Wnt signaling.

[0018] In another embodiment, the present disclosure includes a method for treating a subject having a disease or disorder associated with reduced Wnt signaling, comprising administering to the subject an effective amount of a pharmaceutical composition comprising an isolated antibody, or antigen-binding fragment thereof, disclosed herein that is an agonist of a Wnt signaling pathway. In particular embodiments, the disease or disorder is selected from the group consisting of: bone fractures, stress fractures, vertebral compression fractures, osteoporosis, osteoporotic fractures, non-union fractures, delayed union fractures, spinal fusion, pre-operative optimization for spine surgeries, osteonecrosis, osseointegration of implants or orthopedic devices, osteogenesis imperfecta, bone grafts, tendon repair, tendon-bone integration, tooth growth and regeneration, maxillofacial surgery, dental implantation, periodontal diseases, maxillofacial reconstruction, osteonecrosis of the jaw, hip or femoral head, avascular necrosis, alopecia, hearing loss, vestibular hypofunction, macular degeneration, age-related macular degeneration (AMD), vitreoretinopathy, retinopathy, diabetic retinopathy, diseases of retinal degeneration, Fuchs' dystrophy, cornea diseases, stroke, traumatic brain injury, Alzheimer's disease, multiple sclerosis, diseases affecting blood brain barrier (BBB), spinal cord injuries, spinal cord diseases, oral mucositis, short bowel syndrome, inflammatory bowel diseases (IBD), Crohn's disease (CD), ulcerative colitis (UC), in particular CD with fistula formation, metabolic syndrome, dyslipidemia, diabetes, pancreatitis, exocrine pancreatic insufficiency, wound healing, diabetic foot ulcers, pressure sores, venous leg ulcers, epidermolysis bullosa, dermal hypoplasia, myocardial infarction, coronary artery disease, heart failure, hematopoietic cell disorders, immunodeficiencies, graft versus host diseases, acute kidney injuries, chronic kidney diseases, chronic obstructive pulmonary diseases (COPD), idiopathic pulmonary fibrosis, acute liver failure of all causes, acute liver failure drug-induced, alcoholic liver diseases, chronic liver failure of all causes, cirrhosis, liver fibrosis of all causes, portal hypertension, chronic liver insufficiency of all causes, nonalcoholic steatohepatitis (NASH), nonalcoholic fatty liver disease (NAFLD) (fatty liver), alcoholic hepatitis, hepatitis C virus-induced liver diseases (HCV), hepatitis B virus-induced liver diseases (HBV), other viral hepatitis (e.g., hepatitis A virus-induced liver diseases (HAV) and hepatitis D virus-induced liver diseases (HDV)), primary biliary cirrhosis, autoimmune hepatitis, livery surgery, liver injury, liver transplantation, “small for size” syndrome in liver surgery and transplantation, congenital liver disease and disorders, any other liver disorder or detect resulting from genetic diseases, degeneration, aging, drugs, or injuries.

[0019] In another related embodiment, the present disclosure provides a method for treating or preventing a bone disease or disorder in a subject in need thereof, comprising providing to the subject an effective amount of a pharmaceutical composition comprising an isolated antibody, or antigen-binding fragment thereof, disclosed herein that is an agonist of a Wnt signaling pathway. In certain embodiments, the isolated antibody, or antigen binding fragment thereof, binds Fzd1, Fzd2, and FZD7. In certain embodiments, the isolated antibody, or antigen binding fragment thereof, binds Fzd1, Fzd2, FZD7, Fzd5 and Fzd8. Other Fzd molecules that bind to additional Fzd receptors can also be used with LRP5 and/or LRP6 binders.

[0020] In another related embodiment, the present disclosure provides a method for increasing bone mineral density, increasing bone volume, increasing bone cortical thickness, increasing bone mineral apposition rate, increasing bone stiffness, increasing bone biomechanical strength, increasing resistance to bone fracture, or decreasing bone loss associated with osteoporosis, in a subject in need thereof, comprising providing to the subject an effective amount of a pharmaceutical composition comprising an isolated antibody, or antigen-binding fragment thereof, disclosed herein that is an agonist of a Wnt signaling pathway. In certain embodiments, the isolated antibody, or antigen binding fragment thereof, binds Fzd1, Fzd2, and FZD7. In certain embodiments, the isolated antibody, or antigen binding fragment thereof, binds Fzd1, Fzd2, FZD7, Fzd5 and Fzd8.

[0021] In a related embodiment, the present disclosure provides a method for treating a subject having a disease or disorder associated with increased or enhanced Wnt signaling, comprising administering to the subject an effective amount of the pharmaceutical composition comprising an isolated antibody, or antigen-binding fragment thereof, disclosed herein that is an inhibitor of a Wnt signaling pathway. In certain embodiments, the disease or disorder is selected from the group consisting of: tumors and cancers, degenerative disorders, fibrosis, heart failure, coronary artery disease, heterotopic ossification, osteopetrosis, and congenital high bone mass disorders.

[0022] In a further related embodiment, the present disclosure provides an isolated antibody, or an antigen-binding fragment thereof, that binds one or more Frizzled receptor, where the antibody or antigen-binding fragment thereof binds: an epitope within a region of Frizzled 1 comprising or consisting of amino acid residues 115-230; an epitope within a region of Frizzled 3 comprising or consisting of amino acid residues 29-78; an epitope within a region of Frizzled 4 comprising or consisting of amino acid residues 50-147; an epitope within a region of Frizzled 5 comprising or consisting of amino acid residues 37-149; an epitope within a region of Frizzled 8 comprising or consisting of amino acid residue 55-137; an epitope within a region of Frizzled 9 comprising or consisting of amino acid residues 59-152; or an epitope within a region of Frizzled 10 comprising or consisting of amino acid residues 35-124.

[0023] In certain embodiments, the present disclosure provides an isolated antibody, or an antigen-binding fragment thereof, that binds one or more Frizzled receptor, wherein the antibody or antigen-binding fragment thereof contacts the Frizzled receptor with a distance of less than 5 angstorms at any of the sets of amino acid residues indicated in Table 3.

### BRIEF DESCRIPTION OF THE DRAWINGS

[0024] FIG. 1. (A) shows a graphic depiction of the Fzd1:1RC07 complex. Fzd1 is shown in light grey and the heavy and light chains of 1RC07 are medium and dark grey respectively (B) is a closer view of the Fzd1:1RC07 interface with the position of the CRD loops marked (C) is a closer view of the Zn⁺² binding with 2mFₒ-DF_{c} (at 2.0 σ) and the anomalous-difference maps (at 15.0 σ), shown in blue and yellow mesh, respectively.

[0025] FIG. 2. (A) Overall structure of Fzd1:R2M9 complex. Molecular surface of Fzd1 is shown as light-gray transparent surface. Heavy- and Light-chains of R2M9 are colored in shades of darker- and lighter-black, respectively. The lipid (palmitoleic acid; PAM) as observed in the structure of Wnt8:Fzd8 (PDB code: 4F0A) is shown in light-gray spheres. (B) Close-up view of the Fzd1:R2M9 interface with positions of CDR loops H1, H2, H3 of heavy-chain and L1, L2, and L3 of light-chain are marked.

[0026] FIG. 3. (A) Overall structure of Fzd4:003S-D10 complex. Molecular surface of Fzd4 is shown as light-gray transparent surface. Heavy- and Light-chains of 3SD10 are colored in shades of darker- and light-black. The lipid (palmitoleic acid; PAM) as observed in the structure of Wnt8:Fzd8 (PDB code: 4F0A) is shown in light-gray spheres. (B) Close-up view of the Fzd4:3SD10 interface with positions of CRD loops marked.

[0027] FIG. 4. (A) Overall structure of Fzd5:R2M3 complex. Molecular surface of Fzd5 is shown as light-gray transparent surface. Heavy- and Light-chains of R2M3 are colored in shades of darker- and lighter-black, respectively. The lipid (palmitoleic acid; PAM) as observed in the structure of Wnt8:Fzd8 (PDB code: 4F0A) is shown in light-gray spheres. (B) Close-up view of the Fzd5:R2M3 interface with positions of CDR loops H1, H2, H3 of heavy-chain and L1, L2, and L3 of light-chain are marked.

[0028] FIG. 5. (A) Overall structure of Fzd8:005S-H05 complex. Molecular surface of Fzd8 is shown as light-gray transparent surface. Heavy- and Light-chains of 005S-H05 are colored in shades of darker- and lighter-black, respectively. The lipid (palmitoleic acid; PAM) as observed in the structure of Wnt8:Fzd8 (PDB code: 4F0A) is shown in light-gray spheres. (B) Close-up view of the Fzd8: 005S-H05 interface with positions of CDR loops H1, H2, H3 of heavy-chain and L1, L2, and L3 of light-chain are marked.

[0029] FIG. 6. (A) Overall structure of Fzd5:004S-E05 complex. Molecular surface of Fzd5 is shown as light-gray transparent surface. Heavy- and Light-chains of 004S-E05 are colored in shades of darker- and lighter-black, respectively. The lipid (palmitoleic acid; PAM) as observed in the structure of Wnt8:Fzd8 (PDB code: 4F0A) is shown in light-gray spheres. (B) Close-up view of the Fzd5: 004S-E05 interface with positions of CDR loops H1, H2, H3 of heavy-chain and L1, L2, and L3 of light-chain are marked.

[0030] FIG. 7. (A) Overall structure of Fzd5:4A12 complex. Molecular-surface of Fzd5 is shown as light-gray transparent surface. Heavy- and Light-chains of 4A12 are colored in shades of darker- and lighter-black, respectively. The lipid (palmitoleic acid; PAM) as observed in the structure of Wnt8:Fzd8 (PDB code: 4F0A) is shown in light-gray spheres. (B) Close-up view of the Fzd5:4A12 interface with positions of CDR loops H1, H2, H3 of heavy-chain and L1, L2, and L3 of light-chain are marked.

[0031] FIG. 8. (A) Overall structure of Fzd9:014S-B06 complex. Molecular surface of Fzd5 is shown as light-gray transparent surface. Heavy- and Light-chains of 014S-B06 are colored in shades of darker- and lighter-black, respectively. The lipid (palmitoleic acid; PAM) as observed in the structure of Wnt8:Fzd8 (PDB code: 4F0A) is shown in light-gray spheres. (B) Close-up view of the Fzd5: 014S-B06 interface with positions of CDR loops H1, H2, H3 of heavy-chain and L1, L2, and L3 of light-chain are marked.

[0032] FIG. 9. (A) Overall structure of Fzd10:005S-A07 complex. Molecular surface of Fzd5 is shown as light-gray transparent surface. Heavy- and Light-chains of 005S-A07 are colored in shades of darker- and lighter-black, respectively. The lipid (palmitoleic acid; PAM) as observed in the structure of Wnt8:Fzd8 (PDB code: 4F0A) is shown in light-gray spheres. (B) Close-up view of the Fzd10: 005S-A07 interface with positions of CDR loops H1, H2, H3 of heavy-chain and L1, L2, and L3 of light-chain are marked.

[0033] FIG. 10. (A) Overall structure of Fzd10:005S-E12 complex. Molecular surface of Fzd5 is shown as light-gray transparent surface. Heavy- and Light-chains of 005S-E12 are colored in shades of darker- and lighter-black, respectively. The lipid (palmitoleic acid; PAM) as observed in the structure of Wnt8:Fzd8 (PDB code: 4F0A) is shown in light-gray spheres. (B) Close-up view of the Fzd10: 005S-E12 interface with positions of CDR loops H1, H2, H3 of heavy-chain and L1, L2, and L3 of light-chain are marked.

[0034] FIG. 11. (A) Overall structure of Fzd3:029S-E03 complex. Molecular surface of Fzd5 is shown as light-gray transparent surface. Heavy- and Light-chains of 029S-E03 are colored in shades of darker- and lighter-black, respectively. The lipid (palmitoleic acid; PAM) as observed in the structure of Wnt8:Fzd8 (PDB code: 4F0A) is shown in light-gray spheres. (B) Close-up view of the Fzd3: 029S-E03 interface with positions of CDR loops H1, H2, H3 of heavy-chain and L1, L2, and L3 of light-chain are marked.

### DETAILED DESCRIPTION

[0035] The present disclosure relates to antibodies and antigen-binding fragments thereof that specifically bind to one or more Fzd receptor, including antibodies having particular Fzd receptor specificity and/or functional properties. One embodiment of the invention encompasses specific humanized antibodies and fragments thereof capable of binding to one or more Fzd receptor and modulate downstream Wnt pathway signaling and related biological effects.

[0036] Embodiments of the invention pertain to the use of anti-Fzd antibodies or antigen-binding fragments thereof for the diagnosis, assessment and treatment of diseases and disorders associated with Wnt signaling pathways. In certain embodiments, the subject antibodies and antigen-binding fragments thereof are used to modulate a Wnt signaling pathway in a cell or tissue. In certain embodiments, the subject antibodies and antigen-binding fragments thereof are used in the treatment or prevention of diseases and disorders associated with aberrant or deregulated (e.g., either increased or reduced) Wnt signaling, or for which either decreasing or increasing Wnt signaling would provide a therapeutic benefit.

[0037] The practice of the present invention will employ, unless indicated specifically to the contrary, conventional methods of virology, immunology, microbiology, molecular biology and recombinant DNA techniques within the skill of the art, many of which are described below for the purpose of illustration. Such techniques are explained fully in the literature. See, e.g., Current Protocols in Molecular Biology or Current Protocols in Immunology, John Wiley & Sons, New York, N.Y. (2009); Ausubel et al., Short Protocols in Molecular Biology, 3rd ed., Wiley & Sons, 1995; Sambrook and Russell, Molecular Cloning: A Laboratory Manual (3rd Edition, 2001); Maniatis et al. Molecular Cloning: A Laboratory Manual (1982); DNA Cloning: A Practical Approach, vol. I & II (D. Glover, ed.); Oligonucleotide Synthesis (N. Gait, ed., 1984); Nucleic Acid Hybridization (B. Hames & S. Higgins, eds., 1985); Transcription and Translation (B. Hames & S. Higgins, eds., 1984); Animal Cell Culture (R. Freshney, ed., 1986); Perbal, A Practical Guide to Molecular Cloning (1984) and other like references.

[0038] As used in this specification and the appended claims, the singular forms “a,” “an” and “the” include plural references unless the content clearly dictates otherwise.

[0039] Throughout this specification, unless the context requires otherwise, the word “comprise”, or variations such as “comprises” or “comprising”, will be understood to imply the inclusion of a stated element or integer or group of elements or integers but not the exclusion of any other element or integer or group of elements or integers.

[0040] Each embodiment in this specification is to be applied mutatis mutandis to every other embodiment unless expressly stated otherwise.

[0041] Standard techniques may be used for recombinant DNA, oligonucleotide synthesis, and tissue culture and transformation (e.g., electroporation, lipofection). Enzymatic reactions and purification techniques may be performed according to manufacturer's specifications or as commonly accomplished in the art or as described herein. These and related techniques and procedures may be generally performed according to conventional methods well known in the art and as described in various general and more specific references that are cited and discussed throughout the present specification. Unless specific definitions are provided, the nomenclature utilized in connection with, and the laboratory procedures and techniques of, molecular biology, analytical chemistry, synthetic organic chemistry, and medicinal and pharmaceutical chemistry described herein are those well-known and commonly used in the art. Standard techniques may be used for recombinant technology, molecular biological, microbiological, chemical syntheses, chemical analyses, pharmaceutical preparation, formulation, and delivery, and treatment of subjects.

[0042] Embodiments of the present invention relate to antibodies and antigen-binding fragments thereof that bind to one or more Fzd receptor. Sequences of illustrative antibodies, or antigen-binding fragments, or complementarity determining regions (CDRs) thereof, are set forth in Table 1A and SEQ ID NOs:1-65.

[0043] As is well known in the art, an antibody is an immunoglobulin molecule capable of specific binding to a target, such as a carbohydrate, polynucleotide, lipid, polypeptide, etc., through at least one epitope recognition site, located in the variable region of the immunoglobulin molecule. As used herein, the term encompasses not only intact polyclonal or monoclonal antibodies, but also fragments thereof (such as dAb, Fab, Fab′, F(ab′)₂, Fv), single chain (scFv), VHH or sdAb (also known as a nanobody), synthetic variants thereof, naturally occurring variants, fusion proteins comprising an antibody or an antigen-binding fragment thereof, humanized antibodies, chimeric antibodies, and any other modified configuration of the immunoglobulin molecule that comprises an antigen-binding site or fragment (epitope recognition site) of the required specificity. “Diabodies”, multivalent or multispecific fragments constructed by gene fusion (WO94/13804; P. Holliger et al., Proc. Natl. Acad. Sci. USA 90 6444-6448, 1993) are also a particular form of antibody contemplated herein. Minibodies comprising a scFv joined to a CH3 domain are also included herein (S. Hu et al., Cancer Res., 56, 3055-3061, 1996). See e.g., Ward, E. S. et al., Nature 341, 544-546 (1989); Bird et al., Science, 242, 423-426, 1988; Huston et al., PNAS USA, 85, 5879-5883, 1988); PCT/US92/09965; WO94/13804; P. Holliger et al., Proc. Natl. Acad. Sci. USA 90 6444-6448, 1993; Y. Reiter et al., Nature Biotech, 14, 1239-1245, 1996; S. Hu et al., Cancer Res., 56, 3055-3061, 1996.

[0044] The term “antigen-binding fragment” as used herein refers to a polypeptide fragment that contains at least one CDR of an immunoglobulin heavy and/or light chain that binds to the antigen of interest, in particular to one or more Fzd receptor. In this regard, an antigen-binding fragment of the herein described antibodies may comprise 1, 2, 3, 4, 5, or all 6 CDRs of a VH and VL sequence set forth herein from antibodies that bind one or more Fzd receptor. An antigen-binding fragment of the Fzd-specific antibodies described herein is capable of binding to a Fzd receptor. As used herein, the term encompasses not only isolated fragments but also polypeptides comprising an antigen-binding fragment of an antibody disclosed herein, such as, for example, fusion proteins comprising an antigen-binding fragment of an antibody disclosed herein.

[0045] In certain embodiments, an antibody or antigen-binding fragment thereof, modulates Wnt signaling events in a cell contacted with the antibody or antigen-binding fragment thereof. In certain embodiments, the antibody or antigen-binding fragment thereof increases Wnt signaling, while in other embodiments, it decreases Wnt signaling. In certain embodiments, the antibody or antigen-binding fragment thereof binds specifically to and/or modulates the biological activity of the human Wnt signaling pathway.

[0046] The term “antigen” refers to a molecule or a portion of a molecule capable of being bound by a selective binding agent, such as an antibody, and additionally capable of being used in an animal to produce antibodies capable of binding to an epitope of that antigen. In certain embodiments, an antibody is said to specifically bind an antigen when it preferentially recognizes its target antigen in a complex mixture of proteins and/or macromolecules. In certain embodiments, an antibody is said to specifically bind an antigen when the equilibrium dissociation constant is ≤10⁻⁷ or 10⁻⁸ M. In some embodiments, the equilibrium dissociation constant may be ≤10⁻⁹ M or ≤10⁻¹⁰ M.

[0047] In certain embodiments, antibodies and antigen-binding fragments thereof as described herein include a heavy chain and a light chain CDR set, respectively interposed between a heavy chain and a light chain framework region (FR) set which provide support to the CDRs and define the spatial relationship of the CDRs relative to each other. As used herein, the term “CDR set” refers to the three hypervariable regions of a heavy or light chain V region. Proceeding from the N-terminus of a heavy or light chain, these regions are denoted as “CDR1,” “CDR2,” and “CDR3” respectively. An antigen-binding site, therefore, includes six CDRs, comprising the CDR set from each of a heavy and a light chain V region. A polypeptide comprising a single CDR, (e.g., a CDR1, CDR2 or CDR3) is referred to herein as a “molecular recognition unit.” Crystallographic analysis of a number of antigen-antibody complexes has demonstrated that the amino acid residues of CDRs form extensive contact with bound antigen, wherein the most extensive antigen contact is with the heavy chain CDR3. Thus, the molecular recognition units are primarily responsible for the specificity of an antigen-binding site.

[0048] As used herein, the term “FR set” refers to the four flanking amino acid sequences which frame the CDRs of a CDR set of a heavy or light chain V region. Some FR residues may contact bound antigen; however, FRs are primarily responsible for folding the V region into the antigen-binding site, particularly the FR residues directly adjacent to the CDRs. Within FRs, certain amino residues and certain structural features are very highly conserved. In this regard, all V region sequences contain an internal disulfide loop of around 90 amino acid residues. When the V regions fold into a binding-site, the CDRs are displayed as projecting loop motifs which form an antigen-binding surface. It is generally recognized that there are conserved structural regions of FRs which influence the folded shape of the CDR loops into certain “canonical” structures—regardless of the precise CDR amino acid sequence. Further, certain FR residues are known to participate in non-covalent interdomain contacts which stabilize the interaction of the antibody heavy and light chains.

[0049] The structures and locations of immunoglobulin CDRs and variable domains may be determined by reference to Kabat, E. A. et al., Sequences of Proteins of Immunological Interest. 4th Edition. US Department of Health and Human Services. 1987, and updates thereof, now available on the Internet (immuno.bme.nwu.edu). Alternatively, CDRs may be determined by using “IMGT®, the international ImMunoGeneTics information System® available at http://www.imgt.org (see, e.g., Lefranc, M.-P. et al. (1999) Nucleic Acids Res., 27:209-212; Ruiz, M. et al. (2000) Nucleic Acids Res., 28:219-221; Lefranc, M.-P. (2001) Nucleic Acids Res., 29:207-209; Lefranc, M.-P. (2003) Nucleic Acids Res., 31:307-310; Lefranc, M.-P. et al. (2004) In Silico Biol., 5, 0006 [Epub], 5:45-60 (2005)]; Lefranc, M.-P. et al. (2005) Nucleic Acids Res., 33:D593-597; Lefranc, M.-P. et al. (2009) Nucleic Acids Res., 37:D1006-1012; Lefranc, M.-P. et al. (2015) Nucleic Acids Res., 43:D413-422).

[0050] A “monoclonal antibody” refers to a homogeneous antibody population wherein the monoclonal antibody is comprised of amino acids (naturally occurring and non-naturally occurring) that are involved in the selective binding of an epitope. Monoclonal antibodies are highly specific, being directed against a single epitope. The term “monoclonal antibody” encompasses not only intact monoclonal antibodies and full-length monoclonal antibodies, but also fragments thereof (such as Fab, Fab′, F(ab′)₂, Fv), single chain (scFv), VHH or sdAb, variants thereof, fusion proteins comprising an antigen-binding fragment of a monoclonal antibody, humanized monoclonal antibodies, chimeric monoclonal antibodies, and any other modified configuration of the immunoglobulin molecule that comprises an antigen-binding fragment (epitope recognition site) of the required specificity and the ability to bind to an epitope. It is not intended to be limited as regards the source of the antibody or the manner in which it is made (e.g., by hybridoma, phage selection, recombinant expression, transgenic animals, etc.). The term includes whole immunoglobulins as well as the fragments etc. described above under the definition of “antibody”.

[0051] The proteolytic enzyme papain preferentially cleaves IgG molecules to yield several fragments, two of which (the F(ab) fragments) each comprise a covalent heterodimer that includes an intact antigen-binding site. The enzyme pepsin is able to cleave IgG molecules to provide several fragments, including the F(ab′)₂ fragment which comprises both antigen-binding sites. An Fv fragment for use according to certain embodiments of the present invention can be produced by preferential proteolytic cleavage of an IgM, and on rare occasions of an IgG or IgA immunoglobulin molecule. Fv fragments are, however, more commonly derived using recombinant techniques known in the art. The Fv fragment includes a non-covalent V_{H}::V_{L} heterodimer including an antigen-binding site which retains much of the antigen recognition and binding capabilities of the native antibody molecule. Inbar et al. (1972) Proc. Nat. Acad. Sci. USA 69:2659-2662; Hochman et al. (1976) Biochem 15:2706-2710; and Ehrlich et al. (1980) Biochem 19:4091-4096.

[0052] In certain embodiments, single chain Fv or scFV antibodies are contemplated. For example, Kappa bodies (III et al., Prot. Eng. 10: 949-57 (1997); minibodies (Martin et al., EMBO J 13: 5305-9 (1994); diabodies (Holliger et al., PNAS 90: 6444-8 (1993); or Janusins (Traunecker et al., EMBO J 10: 3655-59 (1991) and Traunecker et al., Int. J. Cancer Suppl. 7: 51-52 (1992), may be prepared using standard molecular biology techniques following the teachings of the present application with regard to selecting antibodies having the desired specificity. In still other embodiments, bispecific or chimeric antibodies may be made that encompass the ligands of the present disclosure. For example, a chimeric antibody may comprise CDRs and framework regions from different antibodies, while bispecific antibodies may be generated that bind specifically to one or more Fzd receptor through one binding domain and to a second molecule through a second binding domain. These antibodies may be produced through recombinant molecular biological techniques or may be physically conjugated together.

[0053] A single chain Fv (scFv) polypeptide is a covalently linked V_{H}::V_{L} heterodimer which is expressed from a gene fusion including V_{H}- and V_{L}-encoding genes linked by a peptide-encoding linker. Huston et al. (1988) Proc. Nat. Acad. Sci. USA 85(16):5879-5883. A number of methods have been described to discern chemical structures for converting the naturally aggregated—but chemically separated—light and heavy polypeptide chains from an antibody V region into an scFv molecule which will fold into a three dimensional structure substantially similar to the structure of an antigen-binding site. See, e.g., U.S. Pat. Nos. 5,091,513 and 5,132,405, to Huston et al.; and U.S. Pat. No. 4,946,778, to Ladner et al.

[0054] In certain embodiments, a Fzd binding antibody as described herein is in the form of a diabody. Diabodies are multimers of polypeptides, each polypeptide comprising a first domain comprising a binding region of an immunoglobulin light chain and a second domain comprising a binding region of an immunoglobulin heavy chain, the two domains being linked (e.g. by a peptide linker) but unable to associate with each other to form an antigen binding site: antigen binding sites are formed by the association of the first domain of one polypeptide within the multimer with the second domain of another polypeptide within the multimer (WO94/13804).

[0055] A dAb fragment of an antibody consists of a VH domain (Ward, E. S. et al., Nature 341, 544-546 (1989)).

[0056] Where bispecific antibodies are to be used, these may be conventional bispecific antibodies, which can be manufactured in a variety of ways (Holliger, P. and Winter G. Current Opinion Biotechnol. 4, 446-449 (1993)), e.g. prepared chemically or from hybrid hybridomas, or may be any of the bispecific antibody fragments mentioned above. Diabodies and scFv can be constructed without an Fc region, using only variable domains, potentially reducing the effects of anti-idiotypic reaction.

[0057] Bispecific diabodies, as opposed to bispecific whole antibodies, may also be particularly useful because they can be readily constructed and expressed in E. coli. Diabodies (and many other polypeptides such as antibody fragments) of appropriate binding specificities can be readily selected using phage display (WO94/13804) from libraries. If one arm of the diabody is to be kept constant, for instance, with a specificity directed against antigen X, then a library can be made where the other arm is varied and an antibody of appropriate specificity selected. Bispecific whole antibodies may be made by knobs-into-holes engineering (J. B. B. Ridgeway et al., Protein Eng., 9, 616-621, 1996).

[0058] In certain embodiments, the antibodies described herein may be provided in the form of a UniBody®. A UniBody® is an IgG4 antibody with the hinge region removed (see GenMab Utrecht, The Netherlands; see also, e.g., US20090226421). This proprietary antibody technology creates a stable, smaller antibody format with an anticipated longer therapeutic window than current small antibody formats. IgG4 antibodies are considered inert and thus do not interact with the immune system. Fully human IgG4 antibodies may be modified by eliminating the hinge region of the antibody to obtain half-molecule fragments having distinct stability properties relative to the corresponding intact IgG4 (GenMab, Utrecht). Halving the IgG4 molecule leaves only one area on the UniBody® that can bind to cognate antigens (e.g., disease targets) and the UniBody® therefore binds univalently to only one site on target cells.

[0059] In certain embodiments, the antibodies of the present disclosure may take the form of a VHH or sdAb. VHH or sdAb technology was originally developed following the discovery and identification that camelidae (e.g., camels and llamas) possess fully functional antibodies that consist of heavy chains only and therefore lack light chains. These heavy-chain only antibodies contain a single variable domain (V_{HH}) and two constant domains (C_{H}2, C_{H}3). The cloned and isolated single variable domains have full antigen binding capacity and are very stable. These single variable domains, with their unique structural and functional properties, form the basis of “VHH or sdAb”. VHH or sdAb are encoded by single genes and are efficiently produced in almost all prokaryotic and eukaryotic hosts e.g. E. coli (see e.g. U.S. Pat. No. 6,765,087), molds (for example Aspergillus or Trichoderma) and yeast (for example Saccharomyces, Kluyvermyces, Hansenula or Pichia (see e.g. U.S. Pat. No. 6,838,254). The production process is scalable and multi-kilogram quantities of VHH or sdAb have been produced. VHH or sdAb may be formulated as a ready-to-use solution having a long shelf life. The Nanoclone® method (see, e.g., WO 06/079372) is a proprietary method for generating VHH or sdAb against a desired target, based on automated high-throughput selection of B-cells. VHH or sdAb are single-domain antigen-binding fragments of camelid-specific heavy-chain only antibodies. VHH or sdAb, typically have a small size of around 15 kDa.

[0060] In certain embodiments, the anti-Fzd antibodies or antigen-binding fragments thereof as disclosed herein are humanized. This refers to a chimeric molecule, generally prepared using recombinant techniques, having an antigen-binding site derived from an immunoglobulin from a non-human species and the remaining immunoglobulin structure of the molecule based upon the structure and/or sequence of a human immunoglobulin. The antigen-binding site may comprise either complete variable domains fused onto constant domains or only the CDRs grafted onto appropriate framework regions in the variable domains. Epitope binding sites may be wild type or modified by one or more amino acid substitutions. This eliminates the constant region as an immunogen in human individuals, but the possibility of an immune response to the foreign variable region remains (LoBuglio, A. F. et al., (1989) Proc Natl Acad Sci USA 86:4220-4224; Queen et al., PNAS (1988) 86:10029-10033; Riechmann et al., Nature (1988) 332:323-327). Illustrative methods for humanization of the anti-Fzd antibodies disclosed herein include the methods described in U.S. Pat. No. 7,462,697.

[0061] Another approach focuses not only on providing human-derived constant regions, but modifying the variable regions as well so as to reshape them as closely as possible to human form. It is known that the variable regions of both heavy and light chains contain three complementarity-determining regions (CDRs) which vary in response to the epitopes in question and determine binding capability, flanked by four framework regions (FRs) which are relatively conserved in a given species and which putatively provide a scaffolding for the CDRs. When nonhuman antibodies are prepared with respect to a particular epitope, the variable regions can be “reshaped” or “humanized” by grafting CDRs derived from nonhuman antibody on the FRs present in the human antibody to be modified. Application of this approach to various antibodies has been reported by Sato, K., et al., (1993) Cancer Res 53:851-856. Riechmann, L., et al., (1988) Nature 332:323-327; Verhoeyen, M., et al., (1988) Science 239:1534-1536; Kettleborough, C. A., et al., (1991) Protein Engineering 4:773-3783; Maeda, H., et al., (1991) Human Antibodies Hybridoma 2:124-134; Gorman, S. D., et al., (1991) Proc Natl Acad Sci USA 88:4181-4185; Tempest, P. R., et al., (1991) Bio/Technology 9:266-271; Co, M. S., et al., (1991) Proc Natl Acad Sci USA 88:2869-2873; Carter, P., et al., (1992) Proc Natl Acad Sci USA 89:4285-4289; and Co, M. S. et al., (1992) J Immunol 148:1149-1154. In some embodiments, humanized antibodies preserve all CDR sequences (for example, a humanized mouse antibody which contains all six CDRs from the mouse antibodies). In other embodiments, humanized antibodies have one or more CDRs (one, two, three, four, five, six) which are altered with respect to the original antibody, which are also termed one or more CDRs “derived from” one or more CDRs from the original antibody.

[0062] In certain embodiments, the antibodies of the present disclosure may be chimeric antibodies. In this regard, a chimeric antibody is comprised of an antigen-binding fragment of an anti-Fzd antibody operably linked or otherwise fused to a heterologous Fc portion of a different antibody. In certain embodiments, the heterologous Fc domain is of human origin. In other embodiments, the heterologous Fc domain may be from a different Ig class from the parent antibody, including IgA (including subclasses IgA1 and IgA2), IgD, IgE, IgG (including subclasses IgG1, IgG2, IgG3, and IgG4), and IgM. In further embodiments, the heterologous Fc domain may be comprised of CH2 and CH3 domains from one or more of the different Ig classes. As noted above with regard to humanized antibodies, the anti-Fzd antigen-binding fragment of a chimeric antibody may comprise only one or more of the CDRs of the antibodies described herein (e.g., 1, 2, 3, 4, 5, or 6 CDRs of the antibodies described herein), or may comprise an entire variable domain (VL, VH or both).

[0063] In certain embodiments, antibodies or antigen-binding fragments thereof disclosed herein include fusion proteins, e.g., Wnt signaling pathway agonist fusion proteins, also referred to herein as “Wnt surrogates.” Wnt surrogates of the present invention are usually biologically active in binding to a cognate Frizzled receptor, and in activation of Wnt signaling, i.e., the surrogate is a Wnt agonist. The term “Wnt agonist activity” refers to the ability of an agonist to mimic the effect or activity of a Wnt protein binding to a frizzled protein. The ability of the agonists of the invention to mimic the activity of Wnt can be confirmed by a number of assays. The agonists of the invention typically initiate a reaction or activity that is similar to or the same as that initiated by the receptor's natural ligand. In particular, the agonists of the invention enhance the canonical Wnt/β-catenin signaling pathway. As used herein, the term “enhances” refers to a measurable increase in the level of Wnt/β-catenin signaling compared with the level in the absence of an agonist of the invention.

[0064] In particular embodiments, a Wnt signaling pathway agonist fusion protein (or Wnt surrogate) comprises an anti-Fzd antibody, or antigen-binding fragment thereof, disclosed herein fused to a polypeptide that specifically binds to LRP5 and/or LRP6. In particular embodiments, the polypeptide that specifically binds to LRP5 and/or LRP6 is an antibody or antigen-binding fragment thereof. If certain embodiments, it is an antibody or antigen-binding fragment thereof disclosed in the U.S. provisional patent application No. 62/607,879, titled, “Anti-LRP5/6 antibodies and Methods of Use,” Attorney docket number SRZN-005/000S, filed on Dec. 19, 2017, which is incorporated herein by reference in its entirety.

[0065] Suitable LRP5/6 binding domains include, without limitation, de novo designed LRP5/6 binding proteins, antibody derived binding proteins, e.g. scFv, Fab, etc. and other portions of antibodies that specifically bind to one or more Fzd proteins; VHH or sdAb derived binding domains; knottin-based engineered scaffolds; naturally occurring LRP5/6, including without limitation, DKK1, DKK2, DKK3, DKK4, sclerostin; Wise; fusion proteins comprising any of the above; derivatives of any of the above; variants of any of the above; and biologically active fragments of any of the above, and the like. A LRP5/6 binding domain may be affinity selected to enhance binding.

[0066] Members of the Dickkopf (DKK) gene family (see Krupnik et al. (1999) Gene 238(2):301-13) include DKK-1, DKK-2, DKK-3, and DKK-4, and the DKK-3 related protein Soggy (Sgy). hDKKs 1-4 contain two distinct cysteine-rich domains in which the positions of 10 cysteine residues are highly conserved between family members. Exemplary sequences of human DKK genes and proteins are publicly available, e.g. Genbank accession number NM_014419 (soggy-1); NM_014420 (DKK4); AF177394 (DKK-1); AF177395 (DKK-2); NM_015881 (DKK3); and NM_014421 (DKK2). In some embodiments of the invention, the Lrp6 binding moiety is a DKK1 peptide, including without limitation the C-terminal domain of human DKK1. The C-terminal domain may comprise the sequence: KMYHTKGQEGSVCLRSSDCASGLCCARHFWSKICKPVLKEGQVCTKHRRKG SHGLEIFQRCYCGEGLSCRIQKDHHQASNSSRLHTCQRH (SEQ ID NO:70; see Genbank accession number NP_036374) or a biologically active fragment thereof.

[0067] Binding of DKK proteins to LRP5/6 are discussed, for example in Brott and Sokol Mol. Cell. Biol. 22 (17), 6100-6110 (2002); and Li et al. J. Biol. Chem. 277 (8), 5977-5981 (2002), each herein specifically incorporated by reference. The corresponding region of human DKK2 (Genbank reference NP_055236) may comprise the sequence: KMSHIKGHEGDPCLRSSDCIEGFCCARHFWTKICKPVLHQGEVCTKQRKKGS HGLEIFQRCDCAKGLSCKVWKDATYSSKARLHVCQK (SEQ ID NO:71) or a biologically active fragment thereof.

[0068] Antibodies that specifically bind to LRP5 or LRP6 are known in the art and are commercially available, or can be generated de novo. LRP5, LRP6 or fragments thereof can be used as an immunogen or in screening assays to develop an antibody. Examples of known antibodies include, without limitation, those described in Gong et al. (2010) PLoS One. 5(9):e12682; Ettenberg et al. (2010) Proc Natl Acad Sci USA. 107(35):15473-8; and those commercially available from, for example Santa Cruz biotechnology antibody clone 1A12, which was raised against synthetic LRP5/6 of human origin and binds to both the full length and proteolytic fragment of LRP 6 and LRP 5 of mouse and human origin; the monoclonal antibody 2611; Cell Signaling Technology antibody specific for LRP5 (D80F2), catalog number 5731; etc.

[0069] In some embodiments, the LRP5/6 binding domain or element may be selected from any domain that binds LRP5/6 at high affinity, e.g. a K_{D} of at least about 1×10⁻⁷ M, at least about 1×10⁻⁸ M, at least about 1×10⁻⁹ M, at least about 1×10⁻¹⁰ M. Suitable LRP5/6 binding domains include, without limitation, de novo designed LRP5/6 binding proteins, antibody derived binding proteins, e.g. scFv, Fab, etc. and other portions of antibodies that specifically bind to one or more Fzd proteins; VHH or sdAb derived binding domains; knottin-based engineered scaffolds; naturally occurring LRP5/6 binding proteins or polypeptides, including without limitation, Norrin, DKK1, DKK2, DKK3, DKK4, sclerostin; and the like. In certain embodiments the LRP5/6 binding domain is a c-terminal portion of DKK1. A LRP5/6 binding domain may be affinity selected to enhance binding.

[0070] The anti-Fzd antibody, or antigen binding fragment thereof, and the LRP5/6 binding domain may be directly joined, or may be separated by a linker, e.g. a polypeptide linker, or a non-peptidic linker, etc. The region of the Wnt surrogate that binds one or more Fzd receptor and the polypeptide that binds LRP5 and/or LRP6 may be contiguous or separated by a linker, e.g. a polypeptide linker, or a non-peptidic linker, etc. The length of the linker, and therefore the spacing between the binding domains can be used to modulate the signal strength, and can be selected depending on the desired use of the Wnt surrogate. The enforced distance between binding domains can vary, but in certain embodiments may be less than about 100 angstroms, less than about 90 angstroms, less than about 80 angstroms, less than about 70 angstroms, less than about 60 angstroms, or less than about 50 angstroms. In some embodiments the linker is a rigid linker, in other embodiments the linker is a flexible linker. Where the linker is a peptide linker, it may be from about 1, 2, 3, 4, 5, 6, 7, 8, 9, 10, 11, 12, 13, 14, 15, 16, 17, 18, 19, 20 21, 22, 23, 24, 25, 26, 27, 28, 29, 30 or more amino acids in length, and is of sufficient length and amino acid composition to enforce the distance between binding domains. In some embodiments, the linker comprises or consists of one or more glycine and/or serine residues.

[0071] A Wnt surrogate can be multimerized, e.g. through an Fc domain, by concatenation, coiled coils, polypeptide zippers, biotin/avidin or streptavidin multimerization, and the like. The Wnt surrogate can also be joined to a moiety such as PEG, Fc, etc. as known in the art to enhance stability in vivo.

[0072] In certain embodiments, a Wnt surrogate direct activates canonical Wnt signaling through binding to one or more Fzd proteins and to LRP5/6, particularly by binding to these proteins on a cell surface, e.g. the surface of a human cell. The direct activation of Wnt signaling by a Wnt surrogate is in contrast to potentiation of Wnt signaling, which enhances activity only when native Wnt proteins are present.

[0073] Wnt surrogates of the present activate Wnt signaling, e.g., by mimicking the effect or activity of a Writ protein binding to a frizzled protein. The ability of the Wnt surrogates of the invention to mimic the activity of Wnt can be confirmed by a number of assays. The Wnt surrogates typically initiate a reaction or activity that is similar to or the same as that initiated by the receptor's natural ligand. In particular, the Wnt surrogates of the invention enhance the canonical Wnt/β-catenin signaling pathway. As used herein, the term “enhances” refers to a measurable increase in the level of Wnt/β-catenin signaling compared with the level in the absence of a Wnt surrogate of the invention.

[0074] In certain embodiments, an antibody or antigen-binding fragment thereof disclosed herein inhibits Wnt pathway signaling. In particular embodiments, binding of an anti-Fzd antibody or antigen-binding fragment thereof blocks or inhibits the binding of endogenous Wnt to one or more Fzd receptor on a cell surface, thus reducing or inhibiting Wnt signaling.

[0075] Various methods are known in the art for measuring the level of canonical Wnt/β-catenin signaling. These include, but are not limited to assays that measure: Wnt/β-catenin target gene expression; TCF reporter gene expression; β-catenin stabilization; LRP phosphorylation; Axin translocation from cytoplasm to cell membrane and binding to LRP. The canonical Wnt/β-catenin signaling pathway ultimately leads to changes in gene expression through the transcription factors TCF7, TCF7L1; TCF7L2 (a.k.a. TCF4), and LEF. The transcriptional response to Wnt activation has been characterized in a number of cells and tissues. As such, global transcriptional profiling by methods well known in the art can be used to assess Wnt/β-catenin signaling activation or inhibition.

[0076] Changes in Wnt-responsive gene expression are generally mediated by TCF and LEF transcription factors. A TCF reporter assay assesses changes in the transcription of TCF/LEE controlled genes to determine the level of Wnt/β-catenin signaling, A TCF reporter assay was first described by Korinek, V. et al., 1997. Also known as TOP/FOP this method involves the use of three copies of the optimal TCF motif CCTTTGATC, or three copies of the mutant motif CCTTTGGCC, upstream of a minimal c-Fos promoter driving luciferase expression (pTOPFI_ASH and pFOPFI_ASH, respectively) to determine the transactivational activity of endogenous β-catenin/TCF4, A higher ratio of these two reporter activities (TOP/FOP) indicates higher β-catenin/TCF4 activity, whereas a lower ratio of these two reporter activities indicates lower β-catenin/TCF4 activity.

[0077] Various other reporter transgenes that respond to Wnt signals exist intact in animals and therefore, effectively reflect endogenous Wnt signaling. These reporters are based on a multimerized TCF binding site, which drives expression of LacZ or GFP, which are readily detectable by methods known in the art. These reporter genes include: TOP-GAL, BAT-GAL, ins-TOPE FP, ins-TOPGAL, LEF-EGFP, Axin2-LacZ, Axin2-d2EGFP, Lgr5tm1 (cre/ERT2), TOPdGFP.

[0078] The recruitment of dephosphorylated β-catenin to the membrane, stabilization and phosphorylation status of β-catenin, and translocation of β-catenin to the nucleus (Klapholz-Brown Z et al., PLoS One, 2(9) e945, 2007), in some cases mediated by complex formation with TCF transcription factors and TNIK are key steps in the Wnt signaling pathway. Stabilization is mediated by Disheveled family proteins that inhibit the “destruction” complex so that degradation of intracellular β-catenin is reduced, and translocation of β-catenin to the nucleus follows thereafter, Therefore, measuring the level and location of β-catenin in a cell is a good reflection of the level of Wnt/β-catenin signaling. A non-limiting example of such an assay is the “Biolmage β-Catenin Redistribution Assay” (Thermo Scientific) which provides recombinant U20S cells that stably express human β-catenin fused to the C-terminus of enhanced green fluorescent protein (EGFP). Imaging and analysis is performed with a fluorescence microscope or HCS platform allowing the levels and distribution of EGFP-β-catenin to be visualized.

[0079] Another way, in which the destruction complex is inhibited, is by removal of Axin by recruitment of Axin to the cytoplasmic tail of the Wnt co-receptor LRP. Axin has been shown to bind preferentially to a phosphorylated form of the LRP tail. Visualization of Axin translocation, for example with a GFP-Axin fusion protein, is therefore another method for assessing levels of Wnt/β-catenin signaling.

[0080] In certain embodiments, a Wnt signaling pathway agonist enhances or increases canonical Wnt pathway signaling, e.g., β-catenin signaling, by at least 30%, 35%, 40%, 45%, 50%, 60%, 70%, 75%, 80%, 85%, 90%, 95%, 100%, 110%, 150%, 200%, 250%, 300%; 400% or 500%, as compared to the β-catenin signaling induced by a neutral substance or negative control as measured in an assay described above, for example as measured in the TOPFlash assay. A negative control may be included in these assays. In particular embodiments, Wnt agonists may enhance β-catenin signaling by a factor of 2×, 5×, 10×, 100×, 1000×, 10000× or more as compared to the activity in the absence of the agonist when measured in an assay described above, for example when measured in the TOPFlash assay, or any of the other assays mentioned herein.

[0081] In certain embodiments, a Wnt signaling pathway antagonist or inhibitor inhibits or decreases canonical Wnt pathway signaling, e.g.; β-catenin signaling, by at least 10%, 20%, 30%, 40%, 50%, 60%, 70%, 75%, 80%, 90%, 95%, or 100%, as compared to the β-catenin signaling observed in the presence of a neutral substance or negative control as measured in an assay described above, for example as measured in the TOPFlash assay. A positive control may be included in these assays.

[0082] “Wnt gene product” or “Wnt polypeptide” when used herein encompass native sequence Wnt polypeptides, Wnt polypeptide variants, Wnt polypeptide fragments and chimeric Wnt polypeptides. In particular embodiments, a Wnt polypeptide is a native human full length mature Wnt protein.

[0083] For example; human native sequence Wnt proteins of interest in the present application include the following: Wnt-1 (GenBank Accession No. NM_005430); Wnt-2 (GenBank Accession No. NM_003391); Wnt-2B (Wnt-13) (GenBank Accession No. NM_004185 (isoform 1), NM_024494.2 (isoform 2)), Wnt-3 (RefSeq.: NM_030753), Wnt3a (GenBank Accession No. NM_033131), Wnt-4 (GenBank Accession No. NM_030761), Wnt-5A (GenBank Accession No. NM_003392), Wnt-5B (GenBank Accession No. NM_032642), Wnt-6 (GenBank Accession No. NM_006522), Wnt-7A (GenBank Accession No. NM_004625), Wnt-7B (GenBank Accession No. NM_058238), Wnt-8A (GenBank Accession No. NM_058244), Wnt-8B (GenBank Accession No. NM_003393), Wnt-9A (Wnt-14) (GenBank Accession No. NM_003395), Wnt-98 (Wnt-15) (GenBank Accession No. NM_003396), Wnt-1 μM, (GenBank Accession No. NM_025216), Wnt-108 (GenBank Accession No. NM_003394), Wnt-11 (GenBank Accession No. NM_004626), Wnt 16 (GenBank Accession No. NM_016087)). Although each member has varying degrees of sequence identity with the family, all encode small (i.e., 39-46 kD), acylated, palmitoylated, secreted glycoproteins that contain 23-24 conserved cysteine residues whose spacing is highly conserved (McMahon, A P et al., Trends Genet. 1992; 8: 236-242; Miller, J R. Genome Biol. 2002; 3(1): 3001.1.-3001.15). Other native sequence Wnt polypeptides of interest include orthologs of the above from any mammal, including domestic and farm animals, and zoo, laboratory or pet animals, such as dogs, cats, cattle, horses, sheep, pigs, goats, rabbits, rats, mice, frogs, zebra fish, fruit fly, worm, etc.

[0084] “Wnt pathway signaling” or “Wnt signaling” is used herein to refer to the mechanism by which a biologically active Wnt exerts its effects upon a cell to modulate a cell's activity. Wnt proteins modulate cell activity by binding to Wnt receptors, including proteins from the Frizzled (Fzd) family of proteins, proteins from the ROR family of proteins, the proteins LRP5, LRP6 from the LRP family of proteins, the protein FRL1/crypto, and the protein Derailed/Ryk. Once activated by Wnt binding; the Wnt receptor(s) will activate one or more intracellular signaling cascades. These include the canonical Wnt signaling pathway; the Wnt/planar cell polarity (Wnt/PCP) pathway; the Wnt-calcium (Wnt/Ca²⁺) pathway (Giles, R H et al. (2003) Biochim Biophys Acta 1653; 1-24; Peifer, M. et al. (1994) Development 120: 369-380; Papkoff; J. et al (1996) Mol. Cell Biol. 16: 2128-2134; Veeman, M. T. et al. (2003) Dev. Cell 5: 367-377); and other Wnt signaling pathways as is well known in the art.

[0085] For example; activation of the canonical Wnt signaling pathway results in the inhibition of phosphorylation of the intracellular protein β-catenin, leading to an accumulation of β-catenin in the cytosol and its subsequent translocation to the nucleus where it interacts with transcription factors, e.g. TCF/LEF, to activate target genes. Activation of the Wnt/PCP pathway activates RhoA, c-Jun N-terminal kinase (JNK), and neuro-like kinase (NLK) signaling cascades to control such biological processes as tissue polarity and cell movement. Activation of the Wnt/Ca²⁺ by, for example, binding of Wnt-4, Wnt-5A or Wnt-11; elicits an intracellular release of calcium ions, which activates calcium sensitive enzymes like protein kinase C (PKC), calcium-calmodulin dependent kinase H (CamKII) or calcineurin (CaCN). By assaying for activity of the above signaling pathways, the biological activity of an antibody or antigen-binding fragment thereof; e.g.; a Wnt surrogate; can be readily determined.

[0086] In certain embodiments, functional properties of anti-Fzd antibodies and antigen-binding fragments thereof may be assessed using a variety of methods known to the skilled person, including e.g., affinity/binding assays (for example, surface plasmon resonance, competitive inhibition assays), cytotoxicity assays, cell viability assays, cell proliferation or differentiation assays in response to a Wnt, cancer cell and/or tumor growth inhibition using in vitro or in vivo models, including but not limited to any described herein. Other assays may test the ability of antibodies described herein to block normal Wnt/Fzd-mediated responses. The antibodies and antigen-binding fragments thereof described herein may also be tested for effects on Fzd receptor internalization, in vitro and in vivo efficacy, etc. Such assays may be performed using well-established protocols known to the skilled person (see e.g., Current Protocols in Molecular Biology (Greene Publ. Assoc. Inc. & John Wiley & Sons, Inc., NY, NY); Current Protocols in Immunology (Edited by: John E. Coligan, Ada M. Kruisbeek, David H. Margulies, Ethan M. Shevach, Warren Strober 2001 John Wiley & Sons, NY, NY); or commercially available kits.

[0087] In certain embodiments, a Fzd-binding antibody or antigen-binding fragment thereof, e.g., a Wnt surrogate, comprises one or more of the CDRs of the antibodies described herein. In this regard, it has been shown in some cases that the transfer of only the VHCDR3 of an antibody can be performed while still retaining desired specific binding (Barbas et al., PNAS (1995) 92: 2529-2533). See also, McLane et al., PNAS (1995) 92:5214-5218, Barbas et al., J. Am. Chem. Soc. (1994) 116:2161-2162.

[0088] Marks et al (Bio/Technology, 1992, 10:779-783) describe methods of producing repertoires of antibody variable domains in which consensus primers directed at or adjacent to the 5′ end of the variable domain area are used in conjunction with consensus primers to the third framework region of human VH genes to provide a repertoire of VH variable domains lacking a CDR3. Marks et al further describe how this repertoire may be combined with a CDR3 of a particular antibody. Using analogous techniques, the CDR3-derived sequences of the presently described antibodies may be shuffled with repertoires of VH or VL domains lacking a CDR3, and the shuffled complete VH or VL domains combined with a cognate VL or VH domain to provide an antibody or antigen-binding fragment thereof that binds one or more Fzd receptors. The repertoire may then be displayed in a suitable host system such as the phage display system of WO92/01047 so that suitable antibodies or antigen-binding fragments thereof may be selected. A repertoire may consist of at least from about 10⁴ individual members and upwards by several orders of magnitude, for example, to about from 10⁶ to 10⁸ or 10¹⁰ or more members. Analogous shuffling or combinatorial techniques are also disclosed by Stemmer (Nature, 1994, 370:389-391), who describes the technique in relation to a β-lactamase gene but observes that the approach may be used for the generation of antibodies.

[0089] A further alternative is to generate novel VH or VL regions carrying one or more CDR-derived sequences of the herein described invention embodiments using random mutagenesis of one or more selected VH and/or VL genes to generate mutations within the entire variable domain. Such a technique is described by Gram et al (1992, Proc. Natl. Acad. Sci., USA, 89:3576-3580), who used error-prone PCR. Another method which may be used is to direct mutagenesis to CDR regions of VH or VL genes. Such techniques are disclosed by Barbas et al., (1994, Proc. Natl. Acad. Sci., USA, 91:3809-3813) and Schier et al (1996, J. Mol. Biol. 263:551-567).

[0090] In certain embodiments, a specific VH and/or VL of the antibodies described herein may be used to screen a library of the complementary variable domain to identify antibodies with desirable properties, such as increased affinity for one or more Fzd receptor. Such methods are described, for example, in Portolano et al., J. Immunol. (1993) 150:880-887; Clarkson et al., Nature (1991) 352:624-628.

[0091] Other methods may also be used to mix and match CDRs to identify antibodies having desired binding activity, such as binding to one or more Fzd receptor. For example: Klimka et al., British Journal of Cancer (2000) 83: 252-260, describe a screening process using a mouse VL and a human VH library with CDR3 and FR4 retained from the mouse VH. After obtaining antibodies, the VH was screened against a human VL library to obtain antibodies that bound antigen. Beiboer et al., J. Mol. Biol. (2000) 296:833-849 describe a screening process using an entire mouse heavy chain and a human light chain library. After obtaining antibodies, one VL was combined with a human VH library with the CDR3 of the mouse retained. Antibodies capable of binding antigen were obtained. Rader et al., PNAS (1998) 95:8910-8915 describe a process similar to Beiboer et al above.

[0092] These just-described techniques are, in and of themselves, known as such in the art. The skilled person will, however, be able to use such techniques to obtain antibodies or antigen-binding fragments thereof according to several embodiments of the invention described herein, using routine methodology in the art.

[0093] Also disclosed herein is a method for obtaining an antibody or antigen binding domain specific for a Fzd receptor, the method comprising providing by way of addition, deletion, substitution or insertion of one or more amino acids in the amino acid sequence of a VH domain set out herein or a VH domain which is an amino acid sequence variant of the VH domain, optionally combining the VH domain thus provided with one or more VL domains, and testing the VH domain or VH/VL combination or combinations to identify a specific binding member or an antibody antigen binding domain specific for one or more Fzd receptor and optionally with one or more desired properties. The VL domains may have an amino acid sequence which is substantially as set out herein. An analogous method may be employed in which one or more sequence variants of a VL domain disclosed herein are combined with one or more VH domains.

[0094] In particular embodiments, anti-Fzd antibodies, and antigen-binding fragments thereof, are water soluble. By “Water soluble” it is meant a composition that is soluble in aqueous buffers in the absence of detergent, usually soluble at a concentration that provides a biologically effective dose of the polypeptide. Compositions that are water soluble form a substantially homogenous composition that has a specific activity that is at least about 5% that of the starting material from which it was purified, usually at least about 10%, 20%, or 30% that of the starting material, more usually about 40%, 50%, or 60% that of the starting material, and may be about 50%, about 90% or greater. Anti-Fzd antibodies and antigen-binding fragments thereof, including Wnt surrogates, of the present invention typically form a substantially homogeneous aqueous solution at concentrations of at least 25 μM and higher, e.g. at least 25 μM, 40 μM, or 50 μM, usually at least 60 μM, 70 μM, 80 μM, or 90 μM, sometimes as much as 100 μM, 120 μM, or 150 μM. In other words, compositions of the present invention typically form a substantially homogeneous aqueous solution at concentrations of about 0.1 mg/ml, about 0.5 mg/ml, of about 1 mg/ml or more.

[0095] An antigen or epitope that “specifically binds” or “preferentially binds” (used interchangeably herein) to an antibody or antigen-binding fragment thereof is a term well understood in the art, and methods to determine such specific or preferential binding are also well known in the art. A molecule is said to exhibit “specific binding” or “preferential binding” if it reacts or associates more frequently, more rapidly, with greater duration and/or with greater affinity with a particular cell or substance than it does with alternative cells or substances. An antibody “specifically binds” or “preferentially binds” to a target antigen, e.g., a Fzd receptor, if it binds with greater affinity, avidity, more readily, and/or with greater duration than it binds to other substances. For example, an antibody that specifically or preferentially binds to the Fzd1 receptor is an antibody that binds to the Fzd1 receptor with greater affinity, avidity, more readily, and/or with greater duration than it binds to other Fzd receptors or non-Fzd proteins. It is also understood by reading this definition that, for example, an antibody (or moiety or epitope) that specifically or preferentially binds to a first target may or may not specifically or preferentially bind to a second target. As such, “specific binding” or “preferential binding” does not necessarily require (although it can include) exclusive binding. Generally, but not necessarily, reference to binding means preferential binding.

[0096] In some embodiments the anti-Fzd antibody, or antigen-binding fragment thereof, binds to one, two, three, four, five or more different frizzled proteins, e.g., one or more of human frizzled proteins Fzd1, Fzd2, Fzd3, Fzd4, Fzd5, Fzd5, Fzd7, Fzd8, Fzd9, Fzd10. In some embodiments, the antibody based signaling agonist binds to Fzd1, Fzd2, Fzd5, Fzd7 and Fzd8. In various embodiments, the anti-Fzd antibody, or antigen-binding fragment thereof, binds to: (i) Fzd1, Fzd2, Fzd7 and Fzd9; (ii) Fzd1, Fzd2 and Fzd7; (iii) Fzd5 and Fzd8; (iv) Fzd5, Fzd7 and Fzd8; (v) Fzd1, Fzd4, Fzd5 and Fzd8; (vi) Fzd1, Fzd2, Fzd5, Fzd7 and Fzd8; (vii) Fzd4 and Fzd9; (viii) Fzd9 and Fzd10; (ix) Fzd5, Fzd8 and Fzd10; (x) Fzd4, Fzd5 and Fzd8; (xi) Fzd1, Fzd5, Fzd7 and Fzd8; or (xii) Fzd1, Fzd4, Fzd5, Fzd7 and Fzd8. In some embodiments the frizzled binding moiety is selective for one or more frizzled protein of interest, e.g. having a specificity for the one or more desired frizzled protein of at least 10-fold, 25-fold, 50-fold, 100-fold, 200-fold or more relative to other frizzled proteins.

[0097] Immunological binding generally refers to the non-covalent interactions of the type which occur between an immunoglobulin molecule and an antigen for which the immunoglobulin is specific, for example by way of illustration and not limitation, as a result of electrostatic, ionic, hydrophilic and/or hydrophobic attractions or repulsion, steric forces, hydrogen bonding, van der Waals forces, and other interactions. The strength or affinity of immunological binding interactions can be expressed in terms of the dissociation constant (K_{D}) of the interaction, wherein a smaller K_{D} represents a greater affinity. Immunological binding properties of selected polypeptides can be quantified using methods well known in the art. One such method entails measuring the rates of antigen-binding site/antigen complex formation and dissociation, wherein those rates depend on the concentrations of the complex partners, the affinity of the interaction, and on geometric parameters that equally influence the rate in both directions. Thus, both the “on rate constant” (Kₒₙ) and the “off rate constant” (K_{off}) can be determined by calculation of the concentrations and the actual rates of association and dissociation. The ratio of K_{off}/Kₒₙ enables cancellation of all parameters not related to affinity, and is thus equal to the dissociation constant K_{D}. See, generally, Davies et al. (1990) Annual Rev. Biochem. 59:439-473. In certain embodiment, the anti-Fzd antibodies bind one or more Fzd receptors with a K_{D} of less than or equal to about 1×10⁻⁴ M, less than or equal to about 1×10⁻⁵ M, less than or equal to about 1×10⁻⁶ M, less than or equal to about 1×10⁻⁷ M, less than or equal to about 1×10⁻⁸ M, less than or equal to about 1×10⁻⁹ M, or at least about 1×10⁻¹⁰ M. In certain embodiments, the anti-Fzd antibodies described herein bind one or more Fzd receptor with a K_{D} of less than about 10,000 nM, less than about 1000 nM, less than about 100 nM, less than about 10 nM, less than about 1 nM or less than about 0.1 nM, and in some embodiments, the antibodies may have even higher affinity for one or more Fzd receptor. In certain embodiments, the anti-Fzd antibodies described herein have an affinity K_{D} of about 100, 150, 155, 160, 170, 175, 180, 185, 190, 191, 192, 193, 194, 195, 196, 197, 198 or 199 picomolar, and in some embodiments, the antibodies may have even higher affinity for one or more Fzd receptor.

[0098] An antibody or antigen-binding fragment thereof according to certain embodiments includes antibodies and antigen binding fragments thereof that compete for binding to one or more Fzd receptor with any antibody described herein which both (i) specifically binds to the one or more Fzd receptor and/or (ii) comprises a VH and/or VL domain (or a VH and/or VL CDR set) disclosed herein, or (iii) comprises a VH CDR3 disclosed herein, or a variant of any of these. Competition between antibodies may be assayed easily in vitro, for example using ELISA and/or by tagging a specific reporter molecule to one antibody which can be detected in the presence of other untagged antibodies, to enable identification of specific antibodies which bind the same epitope or an overlapping epitope. Thus, there is provided herein a specific antibody or antigen-binding fragment thereof, comprising a human antibody antigen-binding site which competes with an antibody described herein that binds to one or more Fzd receptor.

[0099] In this regard, as used herein, the terms “competes with”, “inhibits binding” and “blocks binding” (e.g., referring to inhibition/blocking of binding of a Wnt to one or more Fzd receptor or referring to inhibition/blocking of binding of an anti-Fzd antibody to a Fzd receptor) are used interchangeably and encompass both partial and complete inhibition/blocking. The inhibition/blocking of a Wnt to one or more Fzd receptor preferably reduces or alters the normal level or type of cell signaling that occurs when the Wnt binds to the Fzd receptor without inhibition or blocking. Inhibition and blocking are also intended to include any measurable decrease in the binding of a Wnt to a Fzd receptor when in contact with an anti-Fzd antibody as disclosed herein as compared to the ligand not in contact with an anti-Fzd antibody, e.g., the blocking of binding of the Wnt to the Fzd receptor by at least about 10%, 20%, 30%, 40%, 50%, 60%, 65%, 70%, 75%, 80%, 85%, 90%, 91%, 92%, 93%, 94%, 95%, 96%, 97%, 98%, 99%, or 100%.

[0100] The constant regions of immunoglobulins show less sequence diversity than the variable regions, and are responsible for binding a number of natural proteins to elicit important biochemical events. In humans, there are five different classes of antibodies including IgA (which includes subclasses IgA1 and IgA2), IgD, IgE, IgG (which includes subclasses IgG1, IgG2, IgG3, and IgG4), and IgM. The distinguishing features between these antibody classes are their constant regions, although subtler differences may exist in the V region.

[0101] The Fc region of an antibody interacts with a number of Fc receptors and ligands, imparting an array of important functional capabilities referred to as effector functions. For IgG, the Fc region comprises Ig domains CH2 and CH3 and the N-terminal hinge leading into CH2. An important family of Fc receptors for the IgG class are the Fc gamma receptors (FcγRs). These receptors mediate communication between antibodies and the cellular arm of the immune system (Raghavan et al., 1996, Annu Rev Cell Dev Biol 12:181-220; Ravetch et al., 2001, Annu Rev Immunol 19:275-290). In humans this protein family includes FcγRI (CD64), including isoforms FcγRIa, FcγRIb, and FcγRIc; FcγRII (CD32), including isoforms FcγRIIa (including allotypes H131 and R131), FcγRIIb (including FcγRIIb-1 and FcγRIIb-2), and FcγRIIc; and FcγRIII (CD16), including isoforms FcγRIIIa (including allotypes V158 and F158) and FcγRIIIb (including allotypes FcγRIIIb-NA1 and FcγRIIIb-NA2) (Jefferis et al., 2002, Immunol Lett 82:57-65). These receptors typically have an extracellular domain that mediates binding to Fc, a membrane spanning region, and an intracellular domain that may mediate some signaling event within the cell. These receptors are expressed in a variety of immune cells including monocytes, macrophages, neutrophils, dendritic cells, eosinophils, mast cells, platelets, B cells, large granular lymphocytes, Langerhans' cells, natural killer (NK) cells, and T cells. Formation of the Fc/FcγR complex recruits these effector cells to sites of bound antigen, typically resulting in signaling events within the cells and important subsequent immune responses such as release of inflammation mediators, B cell activation, endocytosis, phagocytosis, and cytotoxic attack.

[0102] The ability to mediate cytotoxic and phagocytic effector functions is a potential mechanism by which antibodies destroy targeted cells. The cell-mediated reaction wherein nonspecific cytotoxic cells that express FcγRs recognize bound antibody on a target cell and subsequently cause lysis of the target cell is referred to as antibody dependent cell-mediated cytotoxicity (ADCC) (Raghavan et al., 1996, Annu Rev Cell Dev Biol 12:181-220; Ghetie et al., 2000, Annu Rev Immunol 18:739-766; Ravetch et al., 2001, Annu Rev Immunol 19:275-290). The cell-mediated reaction wherein nonspecific cytotoxic cells that express FcγRs recognize bound antibody on a target cell and subsequently cause phagocytosis of the target cell is referred to as antibody dependent cell-mediated phagocytosis (ADCP). All FcγRs bind the same region on Fc, at the N-terminal end of the Cg2 (CH2) domain and the preceding hinge. This interaction is well characterized structurally (Sondermann et al., 2001, J Mol Biol 309:737-749), and several structures of the human Fc bound to the extracellular domain of human FcγRIIIb have been solved (pdb accession code 1E4K) (Sondermann et al., 2000, Nature 406:267-273.) (pdb accession codes 1IIS and 1 IIX) (Radaev et al., 2001, J Biol Chem 276:16469-16477.)

[0103] The different IgG subclasses have different affinities for the FcγRs, with IgG1 and IgG3 typically binding substantially better to the receptors than IgG2 and IgG4 (Jefferis et al., 2002, Immunol Lett 82:57-65). All FcγRs bind the same region on IgG Fc, yet with different affinities: the high affinity binder FcγRI has a K_{d} for IgG1 of 10⁻⁸ M⁻¹, whereas the low affinity receptors FcγRII and FcγRIII generally bind at 10⁻⁶ and 10⁻⁵ respectively. The extracellular domains of FcγRIIIa and FcγRIIIb are 96% identical; however, FcγRIIIb does not have an intracellular signaling domain. Furthermore, whereas FcγRI, FcγRIIa/c, and FcγRIIIa are positive regulators of immune complex-triggered activation, characterized by having an intracellular domain that has an immunoreceptor tyrosine-based activation motif (ITAM), FcγRIIb has an immunoreceptor tyrosine-based inhibition motif (ITIM) and is therefore inhibitory. Thus the former are referred to as activation receptors, and FcγRIIb is referred to as an inhibitory receptor. The receptors also differ in expression pattern and levels on different immune cells. Yet another level of complexity is the existence of a number of FcγR polymorphisms in the human proteome. A particularly relevant polymorphism with clinical significance is V158/F158 FcγRIIIa. Human IgG1 binds with greater affinity to the V158 allotype than to the F158 allotype. This difference in affinity, and presumably its effect on ADCC and/or ADCP, has been shown to be a significant determinant of the efficacy of the anti-CD20 antibody rituximab (Rituxan®, a registered trademark of IDEC Pharmaceuticals Corporation). Subjects with the V158 allotype respond favorably to rituximab treatment; however, subjects with the lower affinity F158 allotype respond poorly (Cartron et al., 2002, Blood 99:754-758). Approximately 10-20% of humans are V158N158 homozygous, 45% are V158/F158 heterozygous, and 35-45% of humans are F158/F158 homozygous (Lehrnbecher et al., 1999, Blood 94:4220-4232; Cartron et al., 2002, Blood 99:754-758). Thus 80-90% of humans are poor responders, that is, they have at least one allele of the F158 FcγRIIIa.

[0104] The Fc region is also involved in activation of the complement cascade. In the classical complement pathway, C1 binds with its C1q subunits to Fc fragments of IgG or IgM, which has formed a complex with antigen(s). In certain embodiments of the invention, modifications to the Fc region comprise modifications that alter (either enhance or decrease) the ability of a Fzd-specific antibody as described herein to activate the complement system (see e.g., U.S. Pat. No. 7,740,847). To assess complement activation, a complement-dependent cytotoxicity (CDC) assay may be performed (See, e.g., Gazzano-Santoro et al., J. Immunol. Methods, 202:163 (1996)).

[0105] Thus in certain embodiments, the present invention provides anti-Fzd antibodies having a modified Fc region with altered functional properties, such as reduced or enhanced CDC, ADCC, or ADCP activity, or enhanced binding affinity for a specific FcγR or increased serum half-life. Other modified Fc regions contemplated herein are described, for example, in issued U.S. Pat. Nos. 7,317,091; 7,657,380; 7,662,925; 6,538,124; 6,528,624; 7,297,775; 7,364,731; Published U.S. Applications US2009092599; US20080131435; US20080138344; and published International Applications WO2006/105338; WO2004/063351; WO2006/088494; WO2007/024249.

[0106] In certain embodiments, the Fc region may be derived from any of a variety of different Fcs, including but not limited to, a wild-type or modified IgG1, IgG2, IgG3, IgG4 or other isotype, e.g., wild-type or modified human IgG1, human IgG2, human IgG3, human IgG4, human IgG4Pro (comprising a mutation in core hinge region that prevents the formation of IgG4 half molecules), human IgA, human IgE, human IgM, or the modified IgG1 referred to as IgG1 LALAPG. The L₂₃₅A, P₃₂₉G (LALA-PG) variant has been shown to eliminate complement binding and fixation as well as Fc-y dependent antibody-dependent cell-mediated cytotoxity (ADCC) in both murine IgG2a and human IgG1. In particular embodiments of any of the IgG disclosed herein, the IgG comprises one or more of the following amino acid substitutions: N297G, N297A, N297E, L234A, L235A, or P236G.

[0107] Thus, in certain embodiments, antibody variable domains with the desired binding specificities are fused to immunoglobulin constant domain sequences. In certain embodiments, the fusion is with an Ig heavy chain constant domain, comprising at least part of the hinge, C_{H}2, and C_{H}3 regions. It is preferred to have the first heavy-chain constant region (C_{H}1) containing the site necessary for light chain bonding, present in at least one of the fusions. DNAs encoding the immunoglobulin heavy chain fusions and, if desired, the immunoglobulin light chain, are inserted into separate expression vectors, and are co-transfected into a suitable host cell. This provides for greater flexibility in adjusting the mutual proportions of the three polypeptide fragments in embodiments when unequal ratios of the three polypeptide chains used in the construction provide the optimum yield of the desired bispecific antibody. It is, however, possible to insert the coding sequences for two or all three polypeptide chains into a single expression vector when the expression of at least two polypeptide chains in equal ratios results in high yields or when the ratios have no significant effect on the yield of the desired chain combination. Antibodies of the present invention (and antigen-binding fragments and variants thereof) may also be modified to include an epitope tag or label, e.g., for use in purification or diagnostic applications. There are many linking groups known in the art for making antibody conjugates, including, for example, those disclosed in U.S. Pat. No. 5,208,020 or EP Patent 0 425 235 B1, and Chari et al., Cancer Research 52: 127-131 (1992). The linking groups include disulfide groups, thioether groups, acid labile groups, photolabile groups, peptidase labile groups, or esterase labile groups, as disclosed in the above-identified patents, disulfide and thioether groups being preferred.

[0108] In another contemplated embodiment, a Fzd-specific antibody or antigen-binding fragment thereof as described herein may be conjugated or operably linked to another therapeutic compound, referred to herein as a conjugate. The conjugate may be a cytotoxic agent, a chemotherapeutic agent, a cytokine, an anti-angiogenic agent, a tyrosine kinase inhibitor, a toxin, a radioisotope, or other therapeutically active agent. Chemotherapeutic agents, cytokines, anti-angiogenic agents, tyrosine kinase inhibitors, and other therapeutic agents have been described above, and all of these aforementioned therapeutic agents may find use as antibody conjugates.

[0109] Immunoconjugates may be made using a variety of bifunctional protein coupling agents such as N-succinimidyl-3-(2-pyridyldithio)propionate (SPDP), succinimidyl-4-(N-maleimidomethyl)cyclohexane-1-carboxylate, iminothiolane (IT), bifunctional derivatives of imidoesters (such as dimethyl adipimidate HCL), active esters (such as disuccinimidyl suberate), aldehydes (such as glutareldehyde), bis-azido compounds (such as bis (p-azidobenzoyl)hexanediamine), bis-diazonium derivatives (such as bis-(p-diazoniumbenzoyl)-ethylenediamine), diisocyanates (such as toluene 2,6-diisocyanate), and bis-active fluorine compounds (such as 1,5-difluoro-2,4-dinitrobenzene). Particular coupling agents include N-succinimidyl-3-(2-pyridyldithio)propionate (SPDP) (Carlsson et al., Biochem. J. 173:723-737 [1978]) and N-succinimidyl-4-(2-pyridylthio)pentanoate (SPP) to provide for a disulfide linkage. The linker may be a “cleavable linker” facilitating release of one or more cleavable components. For example, an acid-labile linker may be used (Cancer Research 52: 127-131 (1992); U.S. Pat. No. 5,208,020).

[0110] In certain embodiments, anti-LRP5/6 antibodies and antigen-binding fragments thereof are monoclonal antibodies. In certain embodiments, they are humanized.

[0111] The present invention further provides in certain embodiments an isolated nucleic acid encoding an antibody or antigen-binding fragment thereof as described herein, for instance, a nucleic acid that codes for one or more CDR or VH or VL domain as described herein. Nucleic acids include DNA and RNA. These and related embodiments may include polynucleotides encoding antibodies that bind one or more Fzd receptors as described herein. The term “isolated polynucleotide” as used herein shall mean a polynucleotide of genomic, cDNA, or synthetic origin or some combination thereof, which by virtue of its origin the isolated polynucleotide (1) is not associated with all or a portion of a polynucleotide in which the isolated polynucleotide is found in nature, (2) is linked to a polynucleotide to which it is not linked in nature, or (3) does not occur in nature as part of a larger sequence.

[0112] The term “operably linked” means that the components to which the term is applied are in a relationship that allows them to carry out their inherent functions under suitable conditions. For example, a transcription control sequence “operably linked” to a protein coding sequence is ligated thereto so that expression of the protein coding sequence is achieved under conditions compatible with the transcriptional activity of the control sequences.

[0113] The term “control sequence” as used herein refers to polynucleotide sequences that can affect expression, processing or intracellular localization of coding sequences to which they are ligated or operably linked. The nature of such control sequences may depend upon the host organism. In particular embodiments, transcription control sequences for prokaryotes may include a promoter, ribosomal binding site, and transcription termination sequence. In other particular embodiments, transcription control sequences for eukaryotes may include promoters comprising one or a plurality of recognition sites for transcription factors, transcription enhancer sequences, transcription termination sequences and polyadenylation sequences. In certain embodiments, “control sequences” can include leader sequences and/or fusion partner sequences.

[0114] The term “polynucleotide” as referred to herein means single-stranded or double-stranded nucleic acid polymers. In certain embodiments, the nucleotides comprising the polynucleotide can be ribonucleotides or deoxyribonucleotides or a modified form of either type of nucleotide. Said modifications include base modifications such as bromouridine, ribose modifications such as arabinoside and 2′,3′-dideoxyribose and internucleotide linkage modifications such as phosphorothioate, phosphorodithioate, phosphoroselenoate, phosphorodiselenoate, phosphoroanilothioate, phoshoraniladate and phosphoroamidate. The term “polynucleotide” specifically includes single and double stranded forms of DNA.

[0115] The term “naturally occurring nucleotides” includes deoxyribonucleotides and ribonucleotides. The term “modified nucleotides” includes nucleotides with modified or substituted sugar groups and the like. The term “oligonucleotide linkages” includes oligonucleotide linkages such as phosphorothioate, phosphorodithioate, phosphoroselenoate, phosphorodiselenoate, phosphoroanilothioate, phoshoraniladate, phosphoroamidate, and the like. See, e.g., LaPlanche et al., 1986, Nucl. Acids Res., 14:9081; Stec et al., 1984, J. Am. Chem. Soc., 106:6077; Stein et al., 1988, Nucl. Acids Res., 16:3209; Zon et al., 1991, Anti-Cancer Drug Design, 6:539; Zon et al., 1991, OLIGONUCLEOTIDES AND ANALOGUES: A PRACTICAL APPROACH, pp. 87-108 (F. Eckstein, Ed.), Oxford University Press, Oxford England; Stec et al., U.S. Pat. No. 5,151,510; Uhlmann and Peyman, 1990, Chemical Reviews, 90:543, the disclosures of which are hereby incorporated by reference for any purpose. An oligonucleotide can include a detectable label to enable detection of the oligonucleotide or hybridization thereof.

[0116] The term “vector” is used to refer to any molecule (e.g., nucleic acid, plasmid, or virus) used to transfer coding information to a host cell. The term “expression vector” refers to a vector that is suitable for transformation of a host cell and contains nucleic acid sequences that direct and/or control expression of inserted heterologous nucleic acid sequences. Expression includes, but is not limited to, processes such as transcription, translation, and RNA splicing, if introns are present.

[0117] As will be understood by those skilled in the art, polynucleotides may include genomic sequences, extra-genomic and plasm id-encoded sequences and smaller engineered gene segments that express, or may be adapted to express, proteins, polypeptides, peptides and the like. Such segments may be naturally isolated, or modified synthetically by the skilled person.

[0118] As will be also recognized by the skilled artisan, polynucleotides may be single-stranded (coding or antisense) or double-stranded, and may be DNA (genomic, cDNA or synthetic) or RNA molecules. RNA molecules may include HnRNA molecules, which contain introns and correspond to a DNA molecule in a one-to-one manner, and mRNA molecules, which do not contain introns. Additional coding or non-coding sequences may, but need not, be present within a polynucleotide according to the present disclosure, and a polynucleotide may, but need not, be linked to other molecules and/or support materials. Polynucleotides may comprise a native sequence or may comprise a sequence that encodes a variant or derivative of such a sequence.

[0119] Therefore, according to these and related embodiments, the present disclosure also provides polynucleotides encoding the anti-Fzd antibodies and antigen-binding fragments thereof described herein. In certain embodiments, polynucleotides are provided that comprise some or all of a polynucleotide sequence encoding an antibody or antigen-binding fragment thereof as described herein and complements of such polynucleotides.

[0120] It will be appreciated by those of ordinary skill in the art that, as a result of the degeneracy of the genetic code, there are many nucleotide sequences that encodes an antibody as described herein. Some of these polynucleotides bear minimal sequence identity to the nucleotide sequence of the native or original polynucleotide sequence that encode antibodies that bind to a Fzd receptor. Nonetheless, polynucleotides that vary due to differences in codon usage are expressly contemplated by the present disclosure. In certain embodiments, sequences that have been codon-optimized for mammalian expression are specifically contemplated.

[0121] Therefore, in another embodiment of the invention, a mutagenesis approach, such as site-specific mutagenesis, may be employed for the preparation of variants and/or derivatives of the antibodies described herein. By this approach, specific modifications in a polypeptide sequence can be made through mutagenesis of the underlying polynucleotides that encode them. These techniques provide a straightforward approach to prepare and test sequence variants, for example, incorporating one or more of the foregoing considerations, by introducing one or more nucleotide sequence changes into the polynucleotide.

[0122] Site-specific mutagenesis allows the production of mutants through the use of specific oligonucleotide sequences which encode the DNA sequence of the desired mutation, as well as a sufficient number of adjacent nucleotides, to provide a primer sequence of sufficient size and sequence complexity to form a stable duplex on both sides of the deletion junction being traversed. Mutations may be employed in a selected polynucleotide sequence to improve, alter, decrease, modify, or otherwise change the properties of the polynucleotide itself, and/or alter the properties, activity, composition, stability, or primary sequence of the encoded polypeptide.

[0123] In certain embodiments, the inventors contemplate the mutagenesis of the polynucleotide sequences that encode an antibody disclosed herein, or an antigen-binding fragment thereof, to alter one or more properties of the encoded polypeptide, such as the binding affinity of the antibody or the antigen-binding fragment thereof, or the function of a particular Fc region, or the affinity of the Fc region for a particular FcγR. The techniques of site-specific mutagenesis are well-known in the art, and are widely used to create variants of both polypeptides and polynucleotides. For example, site-specific mutagenesis is often used to alter a specific portion of a DNA molecule. In such embodiments, a primer comprising typically about 14 to about 25 nucleotides or so in length is employed, with about 5 to about 10 residues on both sides of the junction of the sequence being altered.

[0124] As will be appreciated by those of skill in the art, site-specific mutagenesis techniques have often employed a phage vector that exists in both a single stranded and double stranded form. Typical vectors useful in site-directed mutagenesis include vectors such as the M13 phage. These phages are readily commercially-available and their use is generally well-known to those skilled in the art. Double-stranded plasmids are also routinely employed in site directed mutagenesis that eliminates the step of transferring the gene of interest from a plasmid to a phage.

[0125] The preparation of sequence variants of the selected peptide-encoding DNA segments using site-directed mutagenesis provides a means of producing potentially useful species and is not meant to be limiting as there are other ways in which sequence variants of peptides and the DNA sequences encoding them may be obtained. For example, recombinant vectors encoding the desired peptide sequence may be treated with mutagenic agents, such as hydroxylamine, to obtain sequence variants. Specific details regarding these methods and protocols are found in the teachings of Maloy et al., 1994; Segal, 1976; Prokop and Bajpai, 1991; Kuby, 1994; and Maniatis et al., 1982, each incorporated herein by reference, for that purpose.

[0126] In many embodiments, the nucleic acids encoding a subject monoclonal antibody are introduced directly into a host cell, and the cell incubated under conditions sufficient to induce expression of the encoded antibody. The antibodies of this disclosure are prepared using standard techniques well known to those of skill in the art in combination with the polypeptide and nucleic acid sequences provided herein. The polypeptide sequences may be used to determine appropriate nucleic acid sequences encoding the particular antibody disclosed thereby. The nucleic acid sequence may be optimized to reflect particular codon “preferences” for various expression systems according to standard methods well known to those of skill in the art.

[0127] According to certain related embodiments there is provided a recombinant host cell which comprises one or more constructs as described herein; a nucleic acid encoding any antibody, CDR, VH or VL domain, or antigen-binding fragment thereof; and a method of production of the encoded product, which method comprises expression from encoding nucleic acid therefor. Expression may conveniently be achieved by culturing under appropriate conditions recombinant host cells containing the nucleic acid. Following production by expression, an antibody or antigen-binding fragment thereof, may be isolated and/or purified using any suitable technique, and then used as desired.

[0128] Antibodies or antigen-binding fragments thereof as provided herein, and encoding nucleic acid molecules and vectors, may be isolated and/or purified, e.g. from their natural environment, in substantially pure or homogeneous form, or, in the case of nucleic acid, free or substantially free of nucleic acid or genes of origin other than the sequence encoding a polypeptide with the desired function. Nucleic acid may comprise DNA or RNA and may be wholly or partially synthetic. Reference to a nucleotide sequence as set out herein encompasses a DNA molecule with the specified sequence, and encompasses a RNA molecule with the specified sequence in which U is substituted for T, unless context requires otherwise.

[0129] Systems for cloning and expression of a polypeptide in a variety of different host cells are well known. Suitable host cells include bacteria, mammalian cells, yeast and baculovirus systems. Mammalian cell lines available in the art for expression of a heterologous polypeptide include Chinese hamster ovary cells, HeLa cells, baby hamster kidney cells, NSO mouse melanoma cells and many others. A common, preferred bacterial host is E. coli.

[0130] The expression of antibodies and antigen-binding fragments thereof in prokaryotic cells such as E. coli is well established in the art. For a review, see for example Pluckthun, A. Bio/Technology 9: 545-551 (1991). Expression in eukaryotic cells in culture is also available to those skilled in the art as an option for production of antibodies or antigen-binding fragments thereof, see recent reviews, for example Ref, M. E. (1993) Curr. Opinion Biotech. 4: 573-576; Trill J. J. et al. (1995) Curr. Opinion Biotech 6: 553-560.

[0131] Suitable vectors can be chosen or constructed, containing appropriate regulatory sequences, including promoter sequences, terminator sequences, polyadenylation sequences, enhancer sequences, marker genes and other sequences as appropriate. Vectors may be plasm ids, viral e.g. phage, or phagemid, as appropriate. For further details see, for example, Molecular Cloning: a Laboratory Manual: 2nd edition, Sambrook et al., 1989, Cold Spring Harbor Laboratory Press. Many known techniques and protocols for manipulation of nucleic acid, for example in preparation of nucleic acid constructs, mutagenesis, sequencing, introduction of DNA into cells and gene expression, and analysis of proteins, are described in detail in Current Protocols in Molecular Biology, Second Edition, Ausubel et al. eds., John Wiley & Sons, 1992, or subsequent updates thereto.

[0132] The term “host cell” is used to refer to a cell into which has been introduced, or which is capable of having introduced into it, a nucleic acid sequence encoding one or more of the herein described antibodies, and which further expresses or is capable of expressing a selected gene of interest, such as a gene encoding any herein described antibody. The term includes the progeny of the parent cell, whether or not the progeny are identical in morphology or in genetic make-up to the original parent, so long as the selected gene is present. Accordingly there is also contemplated a method comprising introducing such nucleic acid into a host cell. The introduction may employ any available technique. For eukaryotic cells, suitable techniques may include calcium phosphate transfection, DEAE-Dextran, electroporation, liposome-mediated transfection and transduction using retrovirus or other virus, e.g. vaccinia or, for insect cells, baculovirus. For bacterial cells, suitable techniques may include calcium chloride transformation, electroporation and transfection using bacteriophage. The introduction may be followed by causing or allowing expression from the nucleic acid, e.g. by culturing host cells under conditions for expression of the gene. In one embodiment, the nucleic acid is integrated into the genome (e.g. chromosome) of the host cell. Integration may be promoted by inclusion of sequences which promote recombination with the genome, in accordance-with standard techniques.

[0133] The present invention also provides, in certain embodiments, a method which comprises using a construct as stated above in an expression system in order to express a particular polypeptide such as a Fzd-specific antibody as described herein. The term “transduction” is used to refer to the transfer of genes from one bacterium to another, usually by a phage. “Transduction” also refers to the acquisition and transfer of eukaryotic cellular sequences by retroviruses. The term “transfection” is used to refer to the uptake of foreign or exogenous DNA by a cell, and a cell has been “transfected” when the exogenous DNA has been introduced inside the cell membrane. A number of transfection techniques are well known in the art and are disclosed herein. See, e.g., Graham et al., 1973, Virology 52:456; Sambrook et al., 2001, MOLECULAR CLONING, A LABORATORY MANUAL, Cold Spring Harbor Laboratories; Davis et al., 1986, BASIC METHODS IN MOLECULAR BIOLOGY, Elsevier; and Chu et al., 1981, Gene 13:197. Such techniques can be used to introduce one or more exogenous DNA moieties into suitable host cells.

[0134] The term “transformation” as used herein refers to a change in a cell's genetic characteristics, and a cell has been transformed when it has been modified to contain a new DNA. For example, a cell is transformed where it is genetically modified from its native state. Following transfection or transduction, the transforming DNA may recombine with that of the cell by physically integrating into a chromosome of the cell, or may be maintained transiently as an episomal element without being replicated, or may replicate independently as a plasmid. A cell is considered to have been stably transformed when the DNA is replicated with the division of the cell. The term “naturally occurring” or “native” when used in connection with biological materials such as nucleic acid molecules, polypeptides, host cells, and the like, refers to materials which are found in nature and are not manipulated by a human. Similarly, “non-naturally occurring” or “non-native” as used herein refers to a material that is not found in nature or that has been structurally modified or synthesized by a human.

[0135] The terms “polypeptide” “protein” and “peptide” and “glycoprotein” are used interchangeably and mean a polymer of amino acids not limited to any particular length. The term does not exclude modifications such as myristylation, sulfation, glycosylation, phosphorylation and addition or deletion of signal sequences. The terms “polypeptide” or “protein” means one or more chains of amino acids, wherein each chain comprises amino acids covalently linked by peptide bonds, and wherein said polypeptide or protein can comprise a plurality of chains non-covalently and/or covalently linked together by peptide bonds, having the sequence of native proteins, that is, proteins produced by naturally-occurring and specifically non-recombinant cells, or genetically-engineered or recombinant cells, and comprise molecules having the amino acid sequence of the native protein, or molecules having deletions from, additions to, and/or substitutions of one or more amino acids of the native sequence. The terms “polypeptide” and “protein” specifically encompass the antibodies that bind to a Fzd receptor of the present disclosure, or sequences that have deletions from, additions to, and/or substitutions of one or more amino acid of an anti-Fzd antibody. Thus, a “polypeptide” or a “protein” can comprise one (termed “a monomer”) or a plurality (termed “a multimer”) of amino acid chains.

[0136] The term “isolated protein” or “isolated antibody” referred to herein means that a subject protein or antibody is (1) is free of at least some other proteins with which it would typically be found in nature, (2) is essentially free of other proteins from the same source, e.g., from the same species, (3) is expressed by a cell from a different species, (4) has been separated from at least about 50 percent of polynucleotides, lipids, carbohydrates, or other materials with which it is associated in nature, (5) is not associated (by covalent or noncovalent interaction) with portions of a protein with which the “isolated protein” is associated in nature, (6) is operably associated (by covalent or noncovalent interaction) with a polypeptide with which it is not associated in nature, or (7) does not occur in nature. Such an isolated protein can be encoded by genomic DNA, cDNA, mRNA or other RNA, of may be of synthetic origin, or any combination thereof. In certain embodiments, the isolated protein is substantially free from proteins or polypeptides or other contaminants that are found in its natural environment that would interfere with its use (therapeutic, diagnostic, prophylactic, research or otherwise).

[0137] Amino acid sequence modification(s) of the antibodies described herein are contemplated. For example, it may be desirable to improve the binding affinity and/or other biological properties of the antibody. For example, amino acid sequence variants of an antibody may be prepared by introducing appropriate nucleotide changes into a polynucleotide that encodes the antibody, or a chain thereof, or by peptide synthesis. Such modifications include, for example, deletions from, and/or insertions into and/or substitutions of, residues within the amino acid sequences of the antibody. Any combination of deletion, insertion, and substitution may be made to arrive at the final antibody, provided that the final construct possesses the desired characteristics (e.g., high affinity binding to one or more Fzd receptor). The amino acid changes also may alter post-translational processes of the antibody, such as changing the number or position of glycosylation sites. Any of the variations and modifications described above for polypeptides of the present invention may be included in antibodies of the present invention.

[0138] The present disclosure provides variants of the antibodies and antigen-binding fragments thereof disclosed herein. In certain embodiments, such variant antibodies or antigen-binding fragments, or CDRs thereof, bind to one or more Fzd receptor at least about 50%, at least about 70%, and in certain embodiments, at least about 90% as well as an antibody sequence specifically set forth herein. In further embodiments, such variant antibodies or antigen-binding fragments, or CDRs thereof, bind to one or more Fzd receptor with greater affinity than the antibodies set forth herein, for example, that bind quantitatively at least about 105%, 106%, 107%, 108%, 109%, or 110% as well as an antibody sequence specifically set forth herein.

[0139] In particular embodiments, the antibody or antigen-binding fragment thereof, e.g., a Fab, scFv, VHH or sdAb, or Wnt surrogate, may comprise: a) a heavy chain variable region comprising: i. a CDR1 region that is identical in amino acid sequence to the heavy chain CDR1 region of a selected antibody described herein; ii. a CDR2 region that is identical in amino acid sequence to the heavy chain CDR2 region of the selected antibody; and iii. a CDR3 region that is identical in amino acid sequence to the heavy chain CDR3 region of the selected antibody; and/or b) a light chain variable domain comprising: i. a CDR1 region that is identical in amino acid sequence to the light chain CDR1 region of the selected antibody; ii. a CDR2 region that is identical in amino acid sequence to the light chain CDR2 region of the selected antibody; and iii. a CDR3 region that is identical in amino acid sequence to the light chain CDR3 region of the selected antibody; wherein the antibody specifically binds a selected target (e.g., one or more Fzd receptors). In a further embodiment, the antibody, or antigen-binding fragment thereof, is a variant antibody or antigen-binding fragment thereof wherein the variant comprises a heavy and light chain identical to the selected antibody except for up to 8, 9, 10, 11, 12, 13, 14, 15, or more amino acid substitutions in the CDR regions of the VH and VL regions. In this regard, there may be 1, 2, 3, 4, 5, 6, 7, 8, or in certain embodiments, 9, 10, 11, 12, 13, 14, 15 more amino acid substitutions in the CDR regions of the selected antibody. Substitutions may be in CDRs either in the VH and/or the VL regions. (See e.g., Muller, 1998, Structure 6:1153-1167).

[0140] In particular embodiments, a subject antibody or antigen-binding fragments thereof, e.g., a Fab, scFv, VHH or sdAb, or Wnt surrogate, may have: a) a heavy chain variable region having an amino acid sequence that is at least 80% identical, at least 95% identical, at least 90%, at least 95% or at least 98% or 99% identical, to the heavy chain variable region of an anti-Fzd antibody or antigen-binding fragments thereof described herein; and/or b) a light chain variable region having an amino acid sequence that is at least 80% identical, at least 85%, at least 90%, at least 95% or at least 98% or 99% identical, to the light chain variable region of an anti-Fzd antibody or antigen-binding fragments thereof described herein. The amino acid sequences of illustrative antigen-binding fragments thereof are set forth in SEQ ID NOs:1-65.

[0141] In particular embodiments, the antibody or antigen-binding fragment thereof, e.g., a Fab, scFv, VHH or sdAb, or Wnt surrogate, may comprise one or more, two or more, three or more, four or more, five or more, or six of the CDRs identified in Table 1A for any particular antibody. In certain embodiments, the antibody or antigen-binding fragment thereof comprises a CDRH1 comprising or consisting of any of SEQ ID NOs:72-312 or 1327-1347; a CDRH2 comprising or consisting of any of SEQ ID NOs:313-574 or 1348-1360; a CDRH3 comprising or consisting of any of SEQ ID NOs: 575-930, 1361-1387 or 1436-1443; a CDRL1 comprising or consisting of any of SEQ ID NOs: 931-1060 or 1388-1406; a CDRL2 comprising or consisting of any of SEQ ID NOs: 1061-1158 or 1407-1419; and/or a CDRL3 comprising or consisting of any of SEQ ID NOs: 1159-1326, 1420-1435 or 1444-1453.

[0142] A polypeptide has a certain percent “sequence identity” to another polypeptide, meaning that, when aligned, that percentage of amino acids are the same when comparing the two sequences. Sequence similarity can be determined in a number of different manners. To determine sequence identity, sequences can be aligned using the methods and computer programs, including BLAST, available over the world wide web at ncbi.nlm.nih.gov/BLAST/. Another alignment algorithm is FASTA, available in the Genetics Computing Group (GCG) package, from Madison, Wis., USA, a wholly owned subsidiary of Oxford Molecular Group, Inc. Other techniques for alignment are described in Methods in Enzymology, vol. 266: Computer Methods for Macromolecular Sequence Analysis (1996), ed. Doolittle, Academic Press, Inc., a division of Harcourt Brace & Co., San Diego, Calif., USA. Of particular interest are alignment programs that permit gaps in the sequence. The Smith-Waterman is one type of algorithm that permits gaps in sequence alignments. See Meth. Mol. Biol. 70: 173-187 (1997). Also, the GAP program using the Needleman and Wunsch alignment method can be utilized to align sequences. See J. Mol. Biol. 48: 443-453 (1970)

[0143] Of interest is the BestFit program using the local homology algorithm of Smith and Waterman (Advances in Applied Mathematics 2: 482-489 (1981) to determine sequence identity. The gap generation penalty will generally range from 1 to 5, usually 2 to 4 and in many embodiments will be 3. The gap extension penalty will generally range from about 0.01 to 0.20 and in many instances will be 0.10. The program has default parameters determined by the sequences inputted to be compared. Preferably, the sequence identity is determined using the default parameters determined by the program. This program is available also from Genetics Computing Group (GCG) package, from Madison, Wis., USA.

[0144] Another program of interest is the FastDB algorithm. FastDB is described in Current Methods in Sequence Comparison and Analysis, Macromolecule Sequencing and Synthesis, Selected Methods and Applications, pp. 127-149, 1988, Alan R. Liss, Inc. Percent sequence identity is calculated by FastDB based upon the following parameters: Mismatch Penalty: 1.00; Gap Penalty: 1.00; Gap Size Penalty: 0.33; and Joining Penalty: 30.0.

[0145] In particular embodiments, the antibody may comprise: a) a heavy chain variable region comprising: i. a CDR1 region that is identical in amino acid sequence to the heavy chain CDR1 region of a selected antibody described herein; ii. a CDR2 region that is identical in amino acid sequence to the heavy chain CDR2 region of the selected antibody; and iii. a CDR3 region that is identical in amino acid sequence to the heavy chain CDR3 region of the selected antibody; and b) a light chain variable domain comprising: i. a CDR1 region that is identical in amino acid sequence to the light chain CDR1 region of the selected antibody; ii. a CDR2 region that is identical in amino acid sequence to the light chain CDR2 region of the selected antibody; and iii. a CDR3 region that is identical in amino acid sequence to the light chain CDR3 region of the selected antibody; wherein the antibody specifically binds a selected target (e.g., Fzd receptor, such as Fzd1). In a further embodiment, the antibody, or antigen-binding fragment thereof, is a variant antibody wherein the variant comprises a heavy and light chain identical to the selected antibody except for up to 8, 9, 10, 11, 12, 13, 14, 15, or more amino acid substitutions in the CDR regions of the VH and VL regions. In this regard, there may be 1, 2, 3, 4, 5, 6, 7, 8, or in certain embodiments, 9, 10, 11, 12, 13, 14, 15 more amino acid substitutions in the CDR regions of the selected antibody. Substitutions may be in CDRs either in the VH and/or the VL regions. (See e.g., Muller, 1998, Structure 6:1153-1167).

[0146] Determination of the three-dimensional structures of representative polypeptides (e.g., variant Fzd-specific antibodies as provided herein, for instance, an antibody protein having an antigen-binding fragment as provided herein) may be made through routine methodologies such that substitution, addition, deletion or insertion of one or more amino acids with selected natural or non-natural amino acids can be virtually modeled for purposes of determining whether a so derived structural variant retains the space-filling properties of presently disclosed species. See, for instance, Donate et al., 1994 Prot. Sci. 3:2378; Bradley et al., Science 309: 1868-1871 (2005); Schueler-Furman et al., Science 310:638 (2005); Dietz et al., Proc. Nat. Acad. Sci. USA 103:1244 (2006); Dodson et al., Nature 450:176 (2007); Qian et al., Nature 450:259 (2007); Raman et al. Science 327:1014-1018 (2010). Some additional non-limiting examples of computer algorithms that may be used for these and related embodiments, such as for rational design of Fzd-specific antibodies antigen-binding domains thereof as provided herein, include VMD which is a molecular visualization program for displaying, animating, and analyzing large biomolecular systems using 3-D graphics and built-in scripting (see the website for the Theoretical and Computational Biophysics Group, University of Illinois at Urbana-Champagne, at ks.uiuc.edu/Research/vmd/. Many other computer programs are known in the art and available to the skilled person and which allow for determining atomic dimensions from space-filling models (van der Waals radii) of energy-minimized conformations; GRID, which seeks to determine regions of high affinity for different chemical groups, thereby enhancing binding, Monte Carlo searches, which calculate mathematical alignment, and CHARMM (Brooks et al. (1983) J. Comput. Chem. 4:187-217) and AMBER (Weiner et al (1981) J. Comput. Chem. 106: 765), which assess force field calculations, and analysis (see also, Eisenfield et al. (1991) Am. J. Physiol. 261:C376-386; Lybrand (1991) J. Pharm. Belg. 46:49-54; Froimowitz (1990) Biotechniques 8:640-644; Burbam et al. (1990) Proteins 7:99-111; Pedersen (1985) Environ. Health Perspect. 61:185-190; and Kini et al. (1991) J. Biomol. Struct. Dyn. 9:475-488). A variety of appropriate computational computer programs are also commercially available, such as from Schrödinger (Munich, Germany).

[0147] In particular embodiments, the disclosure provides antibodies or antigen-binding fragments thereof that bind to a region of one or more Fzd receptor at a region described in Table 3. In certain embodiments, they bind to a region of LRP6 that comprises or consists of amino acid residues 637-878, where the amino acid sequence and numbering is consist with that described in the Examples. In certain embodiments, they bind to an epitope within the region of LRP6 comprising amino acids 637-878. In certain embodiments, the antibody or antigen-binding fragment thereof contacts the LRP6 at any or all of the contact points disclosed in Table 3. In one embodiment, the core interaction-site or epitope on LRP6 (inter-atomic distances between Lrp6E3E4 and VHH26 less than or equal to 5.0 Å) includes: Arg639, Ala640, Lys622, Glu663, Ile681, Ser682, Lys684, Asp705, Tyr706, Glu708, Thr724, Gly725, Arg751, Try767, Gly768, Gly769, Arg792, Leu810, Asp811, His834, Phe836, Trp850, Ser851, Arg853, Asp874, Tyr875, and Met877 of LRP6. In another embodiment, the core interaction-site (inter-atomic distances between Lrp6E3E4 and VHH36 less than or equal to 5.0 Å) includes: Glu663, Ser665, Ile681, Tyr706, Glu708, Thr724, Ser749, Arg751, Trp767, Gly768, Arg792, Leu810, Asn813, Pro833, His834, Phe836, Trp850, Ser851, Arg853, Asp874, Try875, and Met877 of LRP6.

[0148] The disclosure also provides antibodies and antigen-binding fragments thereof that bind to one or more Frizzled receptors at specific contact points, including any of those disclosed in Table 3, which indicates specific sets of contact points for binding of various anti-Fzd antibodies or fragments thereof.

[0149] In another embodiment of invention, the anti-Fzd antibodies and humanized versions thereof are derived from rabbit monoclonal antibodies, and in particular are generated using RabMAb® technology. These antibodies are advantageous as they require minimal sequence modifications, thereby facilitating retention of functional properties after humanization using mutational lineage guided (MLG) humanization technology (see e.g., U.S. Pat. No. 7,462,697). Thus, illustrative methods for making the anti-Fzd antibodies of the present disclosure include the RabMab® rabbit monoclonal antibody technology described, for example, in U.S. Pat. Nos. 5,675,063 and 7,429,487. In this regard, in certain embodiments, the anti-Fzd antibodies of the disclosure are produced in rabbits. In particular embodiments, a rabbit-derived immortal B-lymphocyte capable of fusion with a rabbit splenocyte is used to produce a hybrid cell that produces an antibody. The immortal B-lymphocyte does not detectably express endogenous immunoglobulin heavy chain and may contain, in certain embodiments, an altered immunoglobulin heavy chain-encoding gene.

### Compositions

[0150] Pharmaceutical compositions comprising an anti-Fzd antibody or antigen-binding fragment thereof, e.g., a Wnt surrogate, described herein and one or more pharmaceutically acceptable diluent, carrier, or excipient are also disclosed. In particular embodiments, the pharmaceutical composition further comprises one or more Wnt polypeptides or Norrin polypeptides.

[0151] In further embodiments, pharmaceutical compositions comprising a polynucleotide comprising a nucleic acid sequence encoding an anti-Fzd antibody or antigen-binding fragment thereof, e.g., a Wnt surrogate, described herein and one or more pharmaceutically acceptable diluent, carrier, or excipient are also disclosed. In particular embodiments, the pharmaceutical composition further comprises one or more polynucleotides comprising a nucleic acid sequence encoding a Wnt polypeptide or Norrin polypeptide. In certain embodiments, the polynucleotides are DNA or mRNA, e.g., a modified mRNA. In particular embodiments, the polynucleotides are modified mRNAs further comprising a 5′ cap sequence and/or a 3′ tailing sequence, e.g., a polyA tail. In other embodiments, the polynucleotides are expression cassettes comprising a promoter operatively linked to the coding sequences. In certain embodiments, the nucleic acid sequence encoding the anti-Fzd antibody or antigen-binding fragment thereof, e.g., a Wnt surrogate, and the nucleic acid sequence encoding the Wnt polypeptide or Norrin polypeptide are present in the same polynucleotide.

[0152] In further embodiments, pharmaceutical compositions comprising an expression vector, e.g., a viral vector, comprising a polynucleotide comprising a nucleic acid sequence encoding an anti-Fzd antibody or antigen-binding fragment thereof, e.g., a Wnt surrogate, described herein and one or more pharmaceutically acceptable diluent, carrier, or excipient are also disclosed. In particular embodiments, the pharmaceutical composition further comprises an expression vector, e.g., a viral vector, comprising a polynucleotide comprising a nucleic acid sequence encoding a Wnt polypeptide or Norrin polypeptide. In certain embodiments, the nucleic acid sequence encoding the anti-Fzd antibody or antigen-binding fragment thereof, e.g., a Wnt surrogate, and the nucleic acid sequence encoding the Wnt polypeptide or Norrin polypeptide are present in the same polynucleotide, e.g., expression cassette.

[0153] The present invention further contemplates a pharmaceutical composition comprising a cell comprising an expression vector comprising a polynucleotide comprising a promoter operatively linked to a nucleic acid encoding an anti-Fzd antibody or antigen-binding fragment thereof described herein and one or more pharmaceutically acceptable diluent, carrier, or excipient. In particular embodiments, the pharmaceutical composition further comprises a cell comprising an expression vector comprising a polynucleotide comprising a promoter operatively linked to a nucleic acid sequence encoding a Wnt polypeptide or a Norrin polypeptide. In certain embodiments, the nucleic acid sequence encoding the anti-Fzd antibody or antigen-binding fragment thereof, e.g., a Wnt surrogate, and the nucleic acid sequence encoding the Wnt polypeptide or Norrin polypeptide are present in the same polynucleotide, e.g., expression cassette and/or in the same cell. In particular embodiments, the cell is a heterologous cell or an autologous cell obtained from the subject to be treated. In particular embodiments, the cell is a stem cell, e.g., an adipose-derived stem cell or a hematopoietic stem cell.

[0154] The present disclosure contemplates pharmaceutical compositions comprising a first molecule for delivery of anti-Fzd antibody or antigen-binding fragment thereof, e.g., a Wnt surrogate, as a first active agent and a second molecule for delivery of a Wnt polypeptide or Norrin polypeptide. The first and second molecule may be the same type of molecule or different types of molecules. For example, in certain embodiments, the first and second molecule may each be independently selected from the following types of molecules: polypeptides, small organic molecules, nucleic acids encoding the first or second active agent (optionally DNA or mRNA, optionally modified RNA), vectors comprising a nucleic acid sequence encoding the first or second active agent (optionally expression vectors or viral vectors), and cells comprising a nucleic acid sequence encoding the first or second active agent (optionally an expression cassette).

[0155] The subject molecules, alone or in combination, can be combined with pharmaceutically-acceptable carriers, diluents, excipients and reagents useful in preparing a formulation that is generally safe, non-toxic, and desirable, and includes excipients that are acceptable for mammalian, e.g., human or primate, use. Such excipients can be solid, liquid, semisolid, or, in the case of an aerosol composition, gaseous. Examples of such carriers, diluents and excipients include, but are not limited to, water, saline, Ringer's solutions, dextrose solution, and 5% human serum albumin. Supplementary active compounds can also be incorporated into the formulations. Solutions or suspensions used for the formulations can include a sterile diluent such as water for injection, saline solution, fixed oils, polyethylene glycols, glycerine, propylene glycol or other synthetic solvents; antibacterial compounds such as benzyl alcohol or methyl parabens; antioxidants such as ascorbic acid or sodium bisulfite; chelating compounds such as ethylenediaminetetraacetic acid (EDTA); buffers such as acetates, citrates or phosphates; detergents such as Tween 20 to prevent aggregation; and compounds for the adjustment of tonicity such as sodium chloride or dextrose. The pH can be adjusted with acids or bases, such as hydrochloric acid or sodium hydroxide. In particular embodiments, the pharmaceutical compositions are sterile.

[0156] Pharmaceutical compositions may further include sterile aqueous solutions or dispersions and sterile powders for the extemporaneous preparation of sterile injectable solutions or dispersion. For intravenous administration, suitable carriers include physiological saline, bacteriostatic water, or phosphate buffered saline (PBS). In some cases, the composition is sterile and should be fluid to allow it to be drawn into a syringe and provided to a subject using a syringe. In certain embodiments, it is stable under the conditions of manufacture and storage and is preserved against the contaminating action of microorganisms such as bacteria and fungi. The carrier can be, e.g., a solvent or dispersion medium containing, for example, water, ethanol, polyol (for example, glycerol, propylene glycol, and liquid polyethylene glycol, and the like), and suitable mixtures thereof. The proper fluidity can be maintained, for example, by the use of a coating such as lecithin, by the maintenance of the required particle size in the case of dispersion and by the use of surfactants. Prevention of the action of microorganisms can be achieved by various antibacterial and antifungal agents, for example, parabens, chlorobutanol, phenol, ascorbic acid, thimerosal, and the like. In many cases, it will be preferable to include isotonic agents, for example, sugars, polyalcohols such as mannitol, sorbitol, sodium chloride in the composition. Prolonged absorption of the internal compositions can be brought about by including in the composition an agent which delays absorption, for example, aluminum monostearate and gelatin.

[0157] Sterile solutions can be prepared by incorporating the anti-Fzd antibody or antigen-binding fragment thereof (or encoding polynucleotide or cell comprising the same) in the required amount in an appropriate solvent with one or a combination of ingredients enumerated above, as required, followed by filtered sterilization. Generally, dispersions are prepared by incorporating the active compound into a sterile vehicle that contains a basic dispersion medium and the required other ingredients from those enumerated above. In the case of sterile powders for the preparation of sterile injectable solutions, methods of preparation are vacuum drying and freeze-drying that yields a powder of the active ingredient plus any additional desired ingredient from a previously sterile-filtered solution thereof.

[0158] In one embodiment, the pharmaceutical compositions are prepared with carriers that will protect the antibody or antigen-binding fragment thereof against rapid elimination from the body, such as a controlled release formulation, including implants and microencapsulated delivery systems. Biodegradable, biocompatible polymers can be used, such as ethylene vinyl acetate, polyanhydrides, polyglycolic acid, collagen, polyorthoesters, and polylactic acid. Methods for preparation of such formulations will be apparent to those skilled in the art. The materials can also be obtained commercially. Liposomal suspensions can also be used as pharmaceutically acceptable carriers. These can be prepared according to methods known to those skilled in the art.

[0159] It may be advantageous to formulate the pharmaceutical compositions in dosage unit form for ease of administration and uniformity of dosage. Dosage unit form as used herein refers to physically discrete units suited as unitary dosages for the subject to be treated; each unit containing a predetermined quantity of active antibody or antigen-binding fragment thereof calculated to produce the desired therapeutic effect in association with the required pharmaceutical carrier. The specification for the dosage unit forms are dictated by and directly dependent on the unique characteristics of the antibody or antigen-binding fragment thereof and the particular therapeutic effect to be achieved, and the limitations inherent in the art of compounding such an active antibody or antigen-binding fragment thereof for the treatment of individuals.

[0160] The pharmaceutical compositions can be included in a container, pack, or dispenser, e.g. syringe, e.g. a prefilled syringe, together with instructions for administration.

[0161] The pharmaceutical compositions of the invention encompass any pharmaceutically acceptable salts, esters, or salts of such esters, or any other compound which, upon administration to an animal comprising a human, is capable of providing (directly or indirectly) the biologically active antibody or antigen-binding fragment thereof.

[0162] The present invention includes pharmaceutically acceptable salts of the anti-Fzd antibodies or antigen-binding fragments thereof, e.g., Wnt surrogates, described herein. The term “pharmaceutically acceptable salt” refers to physiologically and pharmaceutically acceptable salts of the compounds of the invention: i.e., salts that retain the desired biological activity of the parent compound and do not impart undesired toxicological effects thereto. A variety of pharmaceutically acceptable salts are known in the art and described, e.g., in “Remington's Pharmaceutical Sciences”, 17th edition, Alfonso R. Gennaro (Ed.), Mark Publishing Company, Easton, Pa., USA, 1985 (and more recent editions thereof), in the “Encyclopaedia of Pharmaceutical Technology”, 3rd edition, James Swarbrick (Ed.), Informa Healthcare USA (Inc.), NY, USA, 2007, and in J. Pharm. Sci. 66: 2 (1977). Also, for a review on suitable salts, see “Handbook of Pharmaceutical Salts: Properties, Selection, and Use” by Stahl and Wermuth (Wiley-VCH, 2002).

[0163] Pharmaceutically acceptable base addition salts are formed with metals or amines, such as alkali and alkaline earth metals or organic amines. Metals used as cations comprise sodium, potassium, magnesium, calcium, and the like. Amines comprise N-N′-dibenzylethylenediamine, chloroprocaine, choline, diethanolamine, dicyclohexylamine, ethylenediamine, N-methylglucamine, and procaine (see, for example, Berge et al., “Pharmaceutical Salts,” J. Pharma Sci., 1977, 66, 119). The base addition salts of said acidic compounds are prepared by contacting the free acid form with a sufficient amount of the desired base to produce the salt in the conventional manner. The free acid form may be regenerated by contacting the salt form with an acid and isolating the free acid in the conventional manner. The free acid forms differ from their respective salt forms somewhat in certain physical properties such as solubility in polar solvents, but otherwise the salts are equivalent to their respective free acid for purposes of the present invention.

[0164] In some embodiments, the pharmaceutical composition provided herein comprise a therapeutically effective amount of an anti-Fzd antibody or antigen-binding fragment thereof, e.g., a Wnt surrogate, described herein in admixture with a pharmaceutically acceptable carrier, diluent and/or excipient, for example saline, phosphate buffered saline, phosphate and amino acids, polymers, polyols, sugar, buffers, preservatives and other proteins. Exemplary amino acids, polymers and sugars and the like are octylphenoxy polyethoxy ethanol compounds, polyethylene glycol monostearate compounds, polyoxyethylene sorbitan fatty acid esters, sucrose, fructose, dextrose, maltose, glucose, mannitol, dextran, sorbitol, inositol, galactitol, xylitol, lactose, trehalose, bovine or human serum albumin, citrate, acetate, Ringer's and Hank's solutions, cysteine, arginine, carnitine, alanine, glycine, lysine, valine, leucine, polyvinylpyrrolidone, polyethylene and glycol. Preferably, this formulation is stable for at least six months at 4° C.

[0165] In some embodiments, the pharmaceutical composition provided herein comprises a buffer, such as phosphate buffered saline (PBS) or sodium phosphate/sodium sulfate, tris buffer, glycine buffer, sterile water and other buffers known to the ordinarily skilled artisan such as those described by Good et al. (1966) Biochemistry 5:467. The pH of the buffer may be in the range of 6.5 to 7.75, preferably 7 to 7.5, and most preferably 7.2 to 7.4.

### Methods of Use

[0166] The present disclosure also provides methods for using the Fzd-specific antibodies, antigen-binding fragments thereof, e.g., Wnt surrogates, disclosed herein, e.g., to modulate a Wnt signaling pathway, e.g., to increase or decrease Wnt signaling, and the administration of Fzd-specific antibodies, antigen-binding fragments thereof, and Wnt surrogates disclosed herein in a variety of therapeutic settings. Provided herein are methods of treatment using the antibodies that bind one or more Fzd receptors or antigen-binding fragments thereof. In one embodiment, an antibody, or antigen-binding fragment thereof, of the present invention is provided to a subject having a disease involving inappropriate or deregulated Wnt signaling, e.g., increased or reduced Wnt signaling.

[0167] Increasing Wnt Pathway Signaling and Related Therapeutic Methods

[0168] In certain embodiments, an anti-Fzd antibody or antigen-binding fragment thereof, e.g., a Wnt surrogate, may be used to increase Wnt signaling in a tissue or cell. Thus, in some aspects, the present invention provides a method for increasing Wnt signaling or enhancing Wnt signaling in a tissue or cell, comprising contacting the tissue or cell with an effective amount of an anti-Fzd antibody or antigen-binding fragment thereof, e.g., a Wnt surrogate, disclosed herein, wherein the anti-Fzd antibody or antigen-binding fragment thereof is a Wnt signaling pathway agonist. In some embodiments, contacting occurs in vitro, ex vivo, or in vivo. In particular embodiments, the cell is a cultured cell, and the contacting occurs in vitro. In certain embodiments, the method comprises further contacting the tissue or cell with one or more Wnt polypeptides or Norrin polypeptides.

[0169] In related aspects, the present invention provides a method for increasing Wnt signaling in a tissue or cell, comprising contacting the tissue or cell with an effective amount of a polynucleotide comprising an anti-Fzd antibody or antigen-binding fragment thereof, e.g., a Wnt surrogate, of the present invention. In certain embodiments, the target tissue or cell is also contacted with a polynucleotide comprising a nucleic acid sequence that encodes a Wnt polypeptide or a Norrin polypeptide. In certain embodiments, the polynucleotides are DNA or mRNA, e.g., a modified mRNA. In particular embodiments, the polynucleotides are modified mRNAs further comprising a 5′ cap sequence and/or a 3′ tailing sequence, e.g., a polyA tail. In other embodiments, the polynucleotides are expression cassettes comprising a promoter operatively linked to the coding sequences. In certain embodiments, the nucleic acid sequence encoding the anti-Fzd antibody or antigen-binding fragment thereof, e.g., a Wnt surrogate, and the nucleic acid sequence encoding the Wnt polypeptide or Norrin polypeptide are present in the same polynucleotide.

[0170] In related aspects, the present invention provides a method for increasing Wnt signaling in a tissue or cell, comprising contacting the tissue or cell with an effective amount of a vector comprising a nucleic acid sequence encoding an anti-Fzd antibody or antigen-binding fragment thereof, e.g., a Wnt surrogate. In certain embodiments, the tissue or cell is also contacted with a vector comprising a nucleic acid sequence that encodes a Wnt polypeptide or a Norrin polypeptide. In certain embodiments, the vector is an expression vector, and may comprise a promoter operatively linked to the nucleic acid sequence. In particular embodiments, the vector is a viral vector. In certain embodiments, the nucleic acid sequence encoding the anti-Fzd antibody or antigen-binding fragment thereof, e.g., a Wnt surrogate, and the nucleic acid sequence encoding the Wnt polypeptide or Norrin polypeptide are present in the same vector, e.g., in the same expression cassette.

[0171] In related aspects, the present invention provides a method for increasing Wnt signaling in a tissue, comprising contacting the tissue with an effective amount of a cell comprising a nucleic acid sequence encoding an anti-Fzd antibody or antigen-binding fragment thereof, e.g., a Wnt surrogate, of the present invention. In certain embodiments, the tissue is also contacted with a cell comprising a nucleic acid sequence that encodes a Wnt polypeptide or Norrin polypeptide. In certain embodiments, the nucleic acid sequence encoding the anti-Fzd antibody or antigen-binding fragment thereof, e.g., a Wnt surrogate, and the nucleic acid sequence encoding the Wnt polypeptide or Norrin polypeptide are present in the same cell. In particular embodiments, the cell is a heterologous cell or an autologous cell obtained from the subject to be treated. In certain embodiments, the cell was transduced with a vector comprising an expression cassette encoding the anti-Fzd antibody or antigen-binding fragment thereof, e.g., a Wnt surrogate, or the Wnt polypeptide or Norrin polypeptide. In particular embodiments, the cell is a stem cell, e.g., an adipose-derived stem cell or a hematopoietic stem cell.

[0172] Anti-Fzd antibodies and antigen-binding fragments thereof, e.g., Wnt surrogates, may be used in to treat a disease, disorder or condition, for example, by increasing Wnt signaling in a targeted cell, tissue or organ. Thus, in some aspects, the present invention provides a method for treating a disease or condition in a subject in need thereof, e.g., a disease or disorder associated with reduced Wnt signaling, or for which increased Wnt signaling would provide a therapeutic benefit, comprising contacting the subject with an effective amount of a composition of the present disclosure. In particular embodiments, the composition is a pharmaceutical composition comprising any of: an anti-Fzd antibody or antigen-binding fragment thereof, e.g., a Wnt surrogate; a polynucleotide comprising a nucleic acid sequence encoding an anti-Fzd antibody or antigen-binding fragment thereof, e.g., a Wnt surrogate, e.g., a DNA or mRNA, optionally a modified mRNA; a vector comprising a nucleic acid sequence encoding an anti-Fzd antibody or antigen-binding fragment thereof, e.g., a Wnt surrogate, e.g., an expression vector or viral vector; or a cell comprising a nucleic acid sequence encoding an anti-Fzd antibody or antigen-binding fragment thereof, e.g., a Wnt surrogate, e.g., a cell transduced with an expression vector or viral vector encoding an anti-Fzd antibody or antigen-binding fragment thereof, e.g., a Wnt surrogate. In particular embodiments, the disease or condition is a pathological disease or disorder, or an injury, e.g., an injury resulting from a wound. In certain embodiments, the wound may be the result of another therapeutic treatment. In certain embodiments, the disease or condition comprises impaired tissue repair, healing or regeneration, or would benefit from increased tissue repair, healing or regeneration. In some embodiments, contacting occurs in vivo, i.e., the subject composition is administered to a subject.

[0173] In certain embodiments, the method comprises further contacting the subject with a pharmaceutical composition comprising one or more Wnt polypeptides or Norrin polypeptides. The present disclosure contemplates contacting a subject with a first molecule for delivery of an anti-Fzd antibody or antigen-binding fragment thereof, e.g., a Wnt surrogate, as a first active agent and a second molecule for delivery of a Wnt polypeptide or Norrin polypeptide. The first and second molecule may be the same type of molecule or different types of molecules. For example, in certain embodiments, the first and second molecule may each be independently selected from the following types of molecules: polypeptides, small organic molecules, nucleic acids encoding the first or second active agent (optionally DNA or mRNA, optionally modified RNA), vectors comprising a nucleic acid sequence encoding the first or second active agent (optionally expression vectors or viral vectors), and cells comprising a nucleic acid sequence encoding the first or second active agent (optionally an expression cassette).

[0174] In related aspects, the present invention provides a method for treating a disease or condition, e.g., a disease or disorder associated with reduced Wnt signaling, or for which increased Wnt signaling would provide a therapeutic benefit, comprising contacting a subject in need thereof with a pharmaceutical composition comprising an effective amount of a polynucleotide comprising a nucleic acid sequence encoding an anti-Fzd antibody or antigen-binding fragment thereof, e.g., a Wnt surrogate, disclosed herein. In certain embodiments, the subject is also contacted with a pharmaceutical composition comprising an effective amount of a polynucleotide comprising a nucleic acid sequence that encodes a Wnt polypeptide or a Norrin polypeptide. In certain embodiments, the polynucleotides are DNA or mRNA, e.g., a modified mRNA. In particular embodiments, the polynucleotides are modified mRNAs further comprising a 5′ cap sequence and/or a 3′ tailing sequence, e.g., a polyA tail. In other embodiments, the polynucleotides are expression cassettes comprising a promoter operatively linked to the coding sequences. In certain embodiments, the nucleic acid sequence encoding the anti-Fzd antibody or antigen-binding fragment thereof, e.g., a Wnt surrogate, and the nucleic acid sequence encoding the Wnt polypeptide or Norrin polypeptide are present in the same polynucleotide.

[0175] In related aspects, the present invention provides a method for treating a disease or condition, e.g., a disease or disorder associated with reduced Wnt signaling, or for which increased Wnt signaling would provide a therapeutic benefit, comprising contacting a subject in need thereof with a pharmaceutical composition comprising an effective amount of a vector comprising a nucleic acid sequence encoding an anti-Fzd antibody or antigen-binding fragment thereof, e.g., a Wnt surrogate. In certain embodiments, the subject is also contacted with a pharmaceutical composition comprising an effective amount of a vector comprising a nucleic acid sequence that encodes a Wnt polypeptide or a Norrin polypeptide. In certain embodiments, the vector is an expression vector, and may comprise a promoter operatively linked to the nucleic acid sequence. In particular embodiments, the vector is a viral vector. In certain embodiments, the nucleic acid sequence encoding the anti-Fzd antibody or antigen-binding fragment thereof, e.g., a Wnt surrogate, and the nucleic acid sequence encoding the Wnt polypeptide or Norrin polypeptide are present in the same vector, e.g., in the same expression cassette.

[0176] In related aspects, the present invention provides a method for treating a disease or condition, e.g., a disease or disorder associated with reduced Wnt signaling, or for which increased Wnt signaling would provide a therapeutic benefit, comprising contacting a subject in need thereof with a pharmaceutical composition comprising an effective amount of a cell comprising a nucleic acid sequence encoding an anti-Fzd antibody or antigen-binding fragment thereof, e.g., a Wnt surrogate. In certain embodiments, the subject is also contacted with a cell comprising a nucleic acid sequence that encodes a Wnt polypeptide or a Norrin polypeptide. In certain embodiments, the nucleic acid sequence encoding the anti-Fzd antibody or antigen-binding fragment thereof, e.g., a Wnt surrogate, and the nucleic acid sequence encoding the Wnt polypeptide or Norrin polypeptide are present in the same cell. In particular embodiments, the cell is a heterologous cell or an autologous cell obtained from the subject to be treated. In certain embodiments, the cell was transduced with a vector comprising an expression cassette encoding the anti-Fzd antibody or antigen-binding fragment thereof, e.g., a Wnt surrogate, or the Wnt polypeptide or Norrin polypeptide. In particular embodiments, the cell is a stem cell, e.g., an adipose-derived stem cell or a hematopoietic stem cell.

[0177] Wnt signaling plays key roles in the developmental process and maintenance of stem cells. Reactivation of Wnt signals is associated with regeneration and repair of most tissues after injuries and diseases. Anti-Fzd antibody or antigen-binding fragment thereof, e.g., a Wnt surrogate, molecules are expected to provide benefit of healing and tissue repair in response to injuries and diseases. Causes of tissue damage and loss include but are not limited to aging, degeneration, hereditary conditions, infection and inflammation, traumatic injuries, toxins/metabolic-induced toxicities, or other pathological conditions. Wnt signals and enhancers of Wnt signals have been shown to activate adult, tissue-resident stem cells. In some embodiments, the compounds of the invention are administered for use in treating diseased or damaged tissue, for use in tissue regeneration and for use in cell growth and proliferation, and/or for use in tissue engineering.

[0178] Human diseases associated with mutations of the Wnt pathway provide strong evidence for enhancement of Wnt signals in the treatment and prevention of diseases. Preclinical in vivo and in vitro studies provide additional evidence of involvement of Wnt signals in many disease conditions and further support utilization of an anti-Fzd antibody or antigen-binding fragment thereof, e.g., a Wnt surrogate, in various human diseases.

[0179] Human diseases associated with mutations of the Wnt pathway provide strong evidence for enhancement of Wnt signals in the treatment and prevention of diseases. Preclinical in vivo and in vitro studies provide additional evidence of involvement of Wnt signals in many disease conditions and further support utilization of a Wnt surrogate molecule in various human diseases. For example, compositions of the present invention may be used to promote or increase bone growth or regeneration, bone grafting, healing of bone fractures, treatment of osteoporosis and osteoporotic fractures, spinal fusion, spinal cord injuries, including vertebral compression fractures, pre-operative spinal surgery optimization, osseointegration of orthopedic devices, tendon-bone integration, tooth growth and regeneration, dental implantation, periodontal diseases, maxillofacial reconstruction, and osteonecrosis of the jaw. They may also be used in the treatment of alopecia; enhancing regeneration of sensory organs, e.g. treatment of hearing loss, including regeneration of inner and outer auditory hair cells treatment of vestibular hypofunction, treatment of macular degeneration, treatment of retinopathies, including vitreoretinopathy, diabetic retinopathy, other diseases of retinal degeneration, Fuchs' dystrophy, other cornea disease, etc.; treatment of stroke, traumatic brain injury, Alzheimer's disease, multiple sclerosis, muscular dystrophy, muscle atrophy as a result of sarcopenia or cachexia, and other conditions affecting the degeneration or integrity of the blood brain barrier. The compositions of this invention may also be used in treatment of oral mucositis, treatment of short bowel syndrome, inflammatory bowel diseases (IBD), including Crohn's disease (CD) and ulcerative colitis (UC), in particular CD with fistula formation, other gastrointestinal disorders; treatment of metabolic syndrome, dyslipidemia, treatment of diabetes, treatment of pancreatitis, conditions where exocrine or endocrine pancreas tissues are damaged; conditions where enhanced epidermal regeneration is desired, e.g., epidermal wound healing, treatment of diabetic foot ulcers, syndromes involving tooth, nail, or dermal hypoplasia, etc., conditions where angiogenesis is beneficial; treatment of myocardial infarction, coronary artery disease, heart failure; enhanced growth of hematopoietic cells, e.g. enhancement of hematopoietic stem cell transplants from bone marrow, mobilized peripheral blood, treatment of immunodeficiencies, graft versus host diseases, etc.; treatment of acute kidney injuries, chronic kidney diseases; treatment of lung diseases, chronic obstructive pulmonary diseases (COPD), pulmonary fibrosis, including idiopathic pulmonary fibrosis, enhanced regeneration of lung tissues. The compositions of the present invention may also be used in enhanced regeneration of liver cells, e.g. liver regeneration, treatment of cirrhosis, enhancement of liver transplantations, treatment of acute liver failure, treatment of chronic liver diseases with hepatitis C or B virus infection or post-antiviral drug therapies, alcoholic liver diseases, alcoholic hepatitis, non-alcoholic liver diseases with steatosis or steatohepatitis, and the like. The compositions of this invention may treat diseases and disorders including, without limitation, conditions in which regenerative cell growth is desired.

[0180] Human genetics involving loss-of-function or gain-of-function mutations in Wnt signaling components show strong evidence supporting enhancing Wnt signals for bone growth. Conditions in which enhanced bone growth is desired may include, without limitation, fractures, grafts, ingrowth around prosthetic devices, osteoporosis, osteoporotic fractures, spinal fusion, vertebral compression fractures, pre-operative optimization for spinal surgeries, osteonecrosis of the jaw, dental implantation, periodontal diseases, maxillofacial reconstruction, and the like. An anti-Fzd antibody or antigen-binding fragment thereof, e.g., a Wnt surrogate, enhances and promotes Wnt signals which are critical in promoting bone regeneration. Methods for regeneration of bone tissues benefit from administration of the compounds of the invention, which can be systemic or localized. In some embodiments, bone marrow cells are exposed to molecules of the invention, such that stem cells within that marrow become activated.

[0181] In some embodiments, bone regeneration is enhanced by contacting a responsive cell population, e.g. bone marrow, bone progenitor cells, bone stem cells, etc. with an effective dose of an anti-Fzd antibody or antigen-binding fragment thereof, e.g., a Wnt surrogate, disclosed herein. Methods for regeneration of bone tissues benefit from administration of the anti-Fzd antibody or antigen-binding fragment thereof, e.g., a Wnt surrogate disclosed herein, which can be systemic or localized. In some such embodiments, the contacting is performed in vivo. In other such embodiments, the contacting is performed ex vivo. The molecule may be localized to the site of action, e.g. by loading onto a matrix, which is optionally biodegradable, and optionally provides for a sustained release of the active agent. Matrix carriers include, without limitation, absorbable collagen sponges, ceramics, hydrogels, polymeric microspheres, nanoparticles, bone cements, and the like.

[0182] Compositions comprising one or more anti-Fzd antibody or antigen-binding fragment thereof, e.g., a Wnt surrogate, disclosed herein can be used for the in vivo treatment of skeletal tissue deficiencies. By “skeletal tissue deficiency”, it is meant a deficiency in bone or other skeletal connective tissue at any site where it is desired to restore the bone or connective tissue, no matter how the deficiency originated, e.g. whether as a result of surgical intervention, removal of tumor, ulceration, implant, fracture, or other traumatic or degenerative conditions. The compositions of the present invention can be used as part of a regimen for restoring cartilage function to a connective tissue, for the repair of defects or lesions in cartilage tissue such as degenerative wear and arthritis, trauma to the tissue, displacement of torn meniscus, meniscectomy, a luxation of a joint by a torn ligament, malalignment of joints, bone fracture, or by hereditary disease.

[0183] An anti-Fzd antibody or antigen-binding fragment thereof, e.g., a Wnt surrogate, may also be used for treatment of periodontal diseases. Periodontal diseases are a leading cause of tooth loss and are linked to multiple systemic conditions. In some embodiments, tooth or underlying bone regeneration is enhanced by contacting a responsive cell population. In some such embodiments, the contacting is performed in vivo. In other such embodiments, the contacting is performed ex vivo, with subsequent implantation of the activated stem or progenitor cells. The molecule may be localized to the site of action, e.g. by loading onto a matrix, which is optionally biodegradable, and optionally provides for a sustained release of the active agent. Matrix carriers include, without limitation, absorbable collagen sponges, ceramics, hydrogels, bone cements, polymeric microspheres, nanoparticles, and the like.

[0184] Studies have shown that biology of Wnt signaling and R-spondins are capable of promoting sensory hair cell regeneration in the inner ear following injuries, aging, or degeneration. Loss of sensory hair cells in the inner ear involved in hearing loss or vestibular hypofunction may also benefit from the compositions of the invention. In the inner ear, the auditory organ houses mechanosensitive hair cells required for translating sound vibration to electric impulses. The vestibular organs, comprised of the semicircular canals (SSCs), the utricle, and the saccule, also contain sensory hair cells in order to detect head position and motion. Compositions of the present invention can be used, for example, in an infusion; in a matrix or other depot system; or other topical application to the ear for enhancement of auditory regeneration.

[0185] An anti-Fzd antibody or antigen-binding fragment thereof, e.g., a Wnt surrogate, may also be used in regeneration of retinal tissue. In the adult mammalian retina, Muller glia cells are capable of regenerating retinal cells, including photoreceptors, for example after neurotoxic injury in vivo. Wnt signaling and enhancers of Wnt signals can promote proliferation of Muller glia-derived retinal progenitors after damage or during degeneration. The compositions of the invention may also be used in the regeneration of tissues and other cell types in the eye. For examples age-related macular degeneration (AMD), other retina degenerative diseases, cornea diseases, Fuchs' dystrophy, vitreoretinopathy, hereditary diseases, etc. can benefit from the compositions of the present inventions. AMD is characterized by progressively decreased central vision and visual acuity. Fuchs' dystrophy is characterized by progressive loss of cornea endothelial cells. Wnt signal and enhancing of Wnt signal can promote regeneration of cornea endothelium, retina epithelium, etc. in the eye tissue. In other embodiments, compositions of the present invention can be used, for example, in an infusion; in a matrix or other depot system; or other topical application to the eye for retinal regeneration and treatment of macular degeneration.

[0186] Specific populations of proliferating cells for homeostatic renewal of hepatocytes have been identified through lineage tracing studies, for example Axin2-positive cells in peri-central region. Lineage tracing studies also identified additional potential liver progenitor cells, including but not limited to Lgr-positive cells. The self-renewing liver cells and other populations of potential progenitor cells, including Lgr5-positive and Axin2-positive cells, are identified to be capable of regeneration responding to Wnt signals and/or R-spondins following injuries. Numerous preclinical models of acute liver injury and failure and chronic liver diseases showed recovery and regeneration of hepatocytes benefit from enhancing Wnt signals. The compositions of this invention may be used in treatment of acute liver failure, acute alcoholic liver injuries, treatment of chronic liver diseases with hepatitis C or B virus infection or post-antiviral drug therapies, chronic alcoholic liver diseases, alcoholic hepatitis, non-alcoholic fatty liver diseases and non-alcoholic steatohepatitis (NASH), treatment of cirrhosis and severe chronic liver diseases of all causes, and enhanced regeneration of liver cells. Methods for regeneration of liver tissue benefit from administration of the compounds of the invention, which can be systemic or localized. These include, but are not limited to, methods of systemic administration and methods of localized administration e.g. by injection into the liver tissue, by injection into veins or blood vessels leading into the liver, by implantation of a sustained release formulation, and the like.

[0187] Wnt signals play an important role in regeneration of various epithelial tissues. Various epidermal conditions benefit from treatment with the compounds of the present invention. Mucositis occurs when there is a breakdown of the rapidly divided epithelial cells lining the gastro-intestinal tract, leaving the mucosal tissue open to ulceration and infection. The part of the epithelial lining that covers the mouth, called the oral mucosa, is one of the most sensitive parts of the body and is particularly vulnerable to chemotherapy and radiation. Oral mucositis is probably the most common, debilitating complication of cancer treatments, particularly chemotherapy and radiation. In addition, the compositions of the invention may also benefit treatment of short bowel syndrome, inflammatory bowel diseases (IBD), or other gastrointestinal disorders. Other epidermal conditions include epidermal wound healing, diabetic foot ulcers, syndromes involving tooth, nail, or dermal hypoplasia, and the like. Molecules of the present invention may be used in all these conditions, where regenerative cells are contacted with compounds of the invention. Methods for regeneration of epithelial tissues benefit from administration of the compounds of the invention, which can be systemic or localized. Contacting can be, for example, topical, including intradermal, subdermal, in a gel, lotion, cream etc. applied at targeted site, etc.

[0188] In addition to skin and gastrointestinal tract, Wnt signals and enhancement and promotion of Wnt signals also play an important role in repair and regeneration of tissues including pancreas, kidney, and lung in preclinical models. An anti-Fzd antibody or antigen-binding fragment thereof, e.g., a Wnt surrogate, may benefit various disease conditions involving exocrine and endocrine pancreas, kidney, or lung. The anti-Fzd antibody or antigen-binding fragment thereof, e.g., a Wnt surrogate, may be used in treatment of metabolic syndrome; treatment of diabetes, treatment of acute or chronic pancreatitis, exocrine pancreatic insufficiency, treatment of acute kidney injuries, chronic kidney diseases, treatment of lung diseases, including but not limited to chronic obstructive pulmonary diseases (COPD), other conditions that cause loss of lung epithelial tissues. Methods for regeneration of these tissues benefit from administration of the compounds of the invention, which can be systemic or localized.

[0189] Epidermal Wnt signaling, in coordination with signaling via other development factors, is critical for adult hair follicle regeneration. Hair loss is a common problem, and androgenetic alopecia, often called male pattern baldness, is the most common form of hair loss in men. In some embodiments, hair follicle regeneration is enhanced by contacting a responsive cell population with a molecule of the present invention. In some such embodiments, the contacting is performed in vivo. In other such embodiments, the contacting is performed ex vivo. The molecule may be localized to the site of action, e.g. topical lotions, gels, creams and the like.

[0190] Stroke, traumatic brain injury, Alzheimer's disease, multiple sclerosis and other conditions affecting the blood brain barrier (BBB) may be treated with an anti-Fzd antibody or antigen-binding fragment thereof, e.g., a Wnt surrogate. Angiogenesis is critical to ensure the supply of oxygen and nutrients to many tissues throughout the body, and is especially important for the CNS as the neural tissue is extremely sensitive to hypoxia and ischemia. CNS endothelial cells which form the BBB differ from endothelial cells in non-neural tissue, in that they are highly polarized cells held together by tight junctions and express specific transporters. Wnt signaling regulates CNS vessel formation and/or function. Conditions in which the BBB is compromised can benefit from administration of the compounds of the invention, which can be systemic or localized e.g. by direct injection, intrathecal administration, implantation of sustained release formulations, and the like. In addition, Wnt signal is actively involved in neurogenesis and plays a role of neuroprotection following injury. The compositions of the present invention may also be used in treatment of spinal cord injuries, other spinal cord diseases, stroke, traumatic brain injuries, etc.

[0191] Wnt signals also play a role in angiogenesis. An anti-Fzd antibody or antigen-binding fragment thereof, e.g., a Wnt surrogate, may benefit conditions where angiogenesis is beneficial, treatment of myocardial infarction, coronary artery disease, heart failure, diabetic retinopathy, etc., and conditions from hereditary diseases. Methods for regeneration of these tissues benefit from administration of the compounds of the invention, which can be systemic or localized.

[0192] In certain embodiments, methods of the present invention promote tissue regeneration, e.g., in a tissue subjected to damage or tissue or cell reduction or loss. The loss or damage can be anything which causes the cell number to diminish, including diseases or injuries. For example, an accident, an autoimmune disorder, a therapeutic side-effect or a disease state could constitute trauma. Tissue regeneration increases the cell number within the tissue and preferably enables connections between cells of the tissue to be re-established, and more preferably the functionality of the tissue to be regained.

[0193] Reducing Wnt Pathway Signaling and Related Therapeutic Methods

[0194] In certain embodiments, an anti-Fzd antibody or antigen-binding fragment thereof, may be used to decrease or inhibit Wnt signaling in a tissue or cell. Thus, in some aspects, the present invention provides a method for decreasing Wnt signaling or inhibiting Wnt signaling in a tissue or cell, comprising contacting the tissue or cell with an effective amount of an anti-Fzd antibody, or antigen-binding fragment thereof, disclosed herein, wherein the anti-Fzd antibody or antigen-binding fragment thereof is a Wnt signaling pathway antagonist or inhibitor. In some embodiments, contacting occurs in vitro, ex vivo, or in vivo. In particular embodiments, the cell is a cultured cell, and the contacting occurs in vitro.

[0195] In related aspects, the present invention provides a method for decreasing or inhibiting Wnt signaling in a tissue or cell, comprising contacting the tissue or cell with an effective amount of a polynucleotide comprising an anti-Fzd antibody or antigen-binding fragment thereof, of the present invention, wherein the anti-Fzd antibody or antigen-binding fragment thereof is a Wnt signaling pathway antagonist or inhibitor. In certain embodiments, the polynucleotides are DNA or mRNA, e.g., a modified mRNA. In particular embodiments, the polynucleotides are modified mRNAs further comprising a 5′ cap sequence and/or a 3′ tailing sequence, e.g., a polyA tail. In other embodiments, the polynucleotides are expression cassettes comprising a promoter operatively linked to the coding sequences

[0196] In related aspects, the present invention provides a method for decreasing or inhibiting Wnt signaling in a tissue or cell, comprising contacting the tissue or cell with an effective amount of a vector comprising a nucleic acid sequence encoding an anti-Fzd antibody or antigen-binding fragment thereof, wherein the anti-Fzd antibody or antigen-binding fragment thereof is a Wnt signaling pathway antagonist or inhibitor. In certain embodiments, the vector is an expression vector, and may comprise a promoter operatively linked to the nucleic acid sequence. In particular embodiments, the vector is a viral vector.

[0197] In related aspects, the present invention provides a method for decreasing or inhibiting Wnt signaling in a tissue, comprising contacting the tissue with an effective amount of a cell comprising a nucleic acid sequence encoding an anti-Fzd antibody or antigen-binding fragment thereof, wherein the anti-Fzd antibody or antigen-binding fragment thereof is a Wnt signaling pathway antagonist or inhibitor. In particular embodiments, the cell is a heterologous cell or an autologous cell obtained from the subject to be treated. In certain embodiments, the cell was transduced with a vector comprising an expression cassette encoding the anti-Fzd antibody or antigen-binding fragment thereof, wherein the anti-Fzd antibody or antigen-binding fragment thereof is a Wnt signaling pathway antagonist or inhibitor. In particular embodiments, the cell is a stem cell, e.g., an adipose-derived stem cell or a hematopoietic stem cell.

[0198] Anti-Fzd antibodies and antigen-binding fragments thereof, wherein the anti-Fzd antibody or antigen-binding fragment thereof is a Wnt signaling pathway antagonist or inhibitor, may be used in to treat a disease, disorder or condition, for example, by decreasing or inhibiting Wnt signaling in a cell, tissue or organ. Thus, in some aspects, the present invention provides a method for treating a disease or condition in a subject in need thereof, e.g., a disease or disorder associated with increased or deregulated Wnt signaling, or for which decreased Wnt signaling would provide a therapeutic benefit, comprising contacting the subject with an effective amount of a composition comprising an anti-Fzd antibody or antigen-binding fragment thereof, wherein the anti-Fzd antibody or antigen-binding fragment thereof is a Wnt signaling pathway antagonist or inhibitor. In particular embodiments, the composition is a pharmaceutical composition comprising any of: an anti-Fzd antibody or antigen-binding fragment thereof; a polynucleotide comprising a nucleic acid sequence encoding an anti-Fzd antibody or antigen-binding fragment thereof, e.g., a DNA or mRNA, optionally a modified mRNA; a vector comprising a nucleic acid sequence encoding an anti-Fzd antibody or antigen-binding fragment thereof, e.g., an expression vector or viral vector; or a cell comprising a nucleic acid sequence encoding an anti-Fzd antibody or antigen-binding fragment thereof, e.g., a cell transduced with an expression vector or viral vector encoding an anti-Fzd antibody or antigen-binding fragment thereof. In particular embodiments, the disease or condition is a pathological disease or disorder, or an injury. In some embodiments, contacting occurs in vivo, i.e., the subject composition is administered to a subject.

[0199] In related aspects, the present invention provides a method for treating a disease or condition, e.g., a disease or disorder associated with increased Wnt signaling, or for which reduced Wnt signaling would provide a therapeutic benefit, comprising contacting a subject in need thereof with a pharmaceutical composition comprising an effective amount of a polynucleotide comprising a nucleic acid sequence encoding an anti-Fzd antibody or antigen-binding fragment thereof, wherein the antibody or antigen-binding fragment thereof is a Wnt signaling pathway antagonist or inhibitor, disclosed herein. In certain embodiments, the polynucleotides are DNA or mRNA, e.g., a modified mRNA. In particular embodiments, the polynucleotides are modified mRNAs further comprising a 5′ cap sequence and/or a 3′ tailing sequence, e.g., a polyA tail. In other embodiments, the polynucleotides are expression cassettes comprising a promoter operatively linked to the coding sequences

[0200] In related aspects, the present invention provides a method for treating a disease or condition, e.g., a disease or disorder associated with increased Wnt signaling, or for which decreased Wnt signaling would provide a therapeutic benefit, comprising contacting a subject in need thereof with a pharmaceutical composition comprising an effective amount of a vector comprising a nucleic acid sequence encoding an anti-Fzd antibody or antigen-binding fragment thereof, wherein the antibody or antigen-binding fragment thereof is a Wnt signaling pathway antagonist or inhibitor. In certain embodiments, the vector is an expression vector, and may comprise a promoter operatively linked to the nucleic acid sequence. In particular embodiments, the vector is a viral vector.

[0201] In related aspects, the present invention provides a method for treating a disease or condition, e.g., a disease or disorder associated with increased Wnt signaling, or for which decreased Wnt signaling would provide a therapeutic benefit, comprising contacting a subject in need thereof with a pharmaceutical composition comprising an effective amount of a cell comprising a nucleic acid sequence encoding an anti-Fzd antibody or antigen-binding fragment thereof, wherein the antibody or antigen-binding fragment thereof is a Wnt signaling pathway antagonist or inhibitor. In particular embodiments, the cell is a heterologous cell or an autologous cell obtained from the subject to be treated. In certain embodiments, the cell was transduced with a vector comprising an expression cassette encoding the anti-Fzd antibody or antigen-binding fragment thereof. In particular embodiments, the cell is a stem cell, e.g., an adipose-derived stem cell or a hematopoietic stem cell.

[0202] In certain embodiments, methods of treating or preventing diseases or disorders in a subject in need thereof, by providing to the subject an effective amount of an anti-Fzd antibody, or an antigen-binding fragment thereof, wherein the antibody or the antigen-binding fragment thereof is an inhibitor of a Wnt signaling pathway, may be used to treat a cancer or tumor, e.g., a solid or liquid tumor. Examples of cancers and tumors that may be treated include, but are not limited to: colon tumors (e.g. colon cancer or adenoma), stomach tumors (e.g., stomach cancer), small intestine tumors (e.g., small intestinal cancer), liver tumors (e.g., liver cancer), pancreas tumors (e.g., pancreatic cancer), lung tumors (e.g., lung cancer), ovary tumors (e.g., ovarian cancer), kidney (e.g., kidney cancer), brain tumors (e.g., brain cancer), spinal cord tumors (e.g., spinal cord cancer), skin tumors (e.g., skin cancer or melanoma), head and neck tumors (e.g., head and neck cancer), gastointestinal tract tumors (e.g., gastrointestinal cancer, esophageal cancer, oral mucosa cancer, tongue cancer, stomach cancer, intestinal cancer, colon cancer), breast tumors (e.g., breast cancer), prostate tumors (e.g., prostate cancer), bone tumors (e.g., bone cancer), vascular tumors, Wilms tumor, leukemina/lymphoma, soft tissue tumors (e.g., soft tissue sarcoma or synovial sarcoma) and metastatic cancers, etc.

[0203] In certain embodiments, methods of treating or preventing diseases or disorders in a subject in need thereof, by providing to the subject an effective amount of an anti-Fzd antibody, or an antigen-binding fragment thereof, wherein the antibody or the antigen-binding fragment thereof is an inhibitor of a Wnt signaling pathway, may be used to treat degenerative diseases. Examples of degenerative diseases that may be treated include, but are not limited to osteoarthritis, cartilage degeneration, sports injuries (e.g., cartilage injury), retinopathy, atherosclerosis, neurodegenerative disorders, and vascular disorders e.g. vasculitis, conditions with abnormal angiogenesis.

[0204] In certain embodiments, methods of treating or preventing diseases or disorders in a subject in need thereof, by providing to the subject an effective amount of an anti-Fzd antibody, or an antigen-binding fragment thereof, wherein the antibody or the antigen-binding fragment thereof is an inhibitor of a Wnt signaling pathway, may be used to treat fibrosis. Examples of fibrosis that may be treated include, but are not limited to, lung fibrosis (including but not limited to COPD and idiopathic pulmonary fibrosis), kidney fibrosis (e.g. end stage renal failure), liver fibrosis, congenital liver storage diseases, and cardiac fibrosis.

[0205] In certain embodiments, methods of treating or preventing diseases or disorders in a subject in need thereof, by providing to the subject an effective amount of an anti-Fzd antibody, or an antigen-binding fragment thereof, wherein the antibody or the antigen-binding fragment thereof is an inhibitor of a Wnt signaling pathway, may be used to treat heart failure, e.g., congestive heart failure, systolic heart failure, heart failure with preserved ejection fraction, or coronary artery disease.

[0206] In certain embodiments, methods of treating or preventing diseases or disorders in a subject in need thereof, by providing to the subject an effective amount of an anti-Fzd antibody, or an antigen-binding fragment thereof, wherein the antibody or the antigen-binding fragment thereof is an inhibitor of a Wnt signaling pathway, may be used to treat heterotopic ossification, osteopetrosis, or congenital high bone mass disorders.

[0207] The terms “administering” or “introducing” or “providing”, as used herein, refer to delivery of a composition to a cell, to cells, tissues and/or organs of a subject, or to a subject. Such administering or introducing may take place in vivo, in vitro or ex vivo.

[0208] In particular embodiments, a pharmaceutical composition is administered parenterally, e.g., intravenously, orally, rectally, or by injection. In some embodiments, it is administered locally, e.g., topically or intramuscularly. In some embodiments, a composition is administered to target tissues, e.g., to bone, joints, ear tissue, eye tissue, gastrointestinal tract, skin, a wound site or spinal cord. Methods of the invention may be practiced in vivo or ex vivo. In some embodiments, the contacting of a target cell or tissue with a tissue-specific Wnt signal enhancing molecule is performed ex vivo, with subsequent implantation of the cells or tissues, e.g., activated stem or progenitor cells, into the subject. The skilled artisan can determine an appropriate site of and route of administration based on the disease or disorder being treated.

[0209] The dose and dosage regimen may depend upon a variety of factors readily determined by a physician, such as the nature of the disease or disorder, the characteristics of the subject, and the subject's history. In particular embodiments, the amount of anti-Fzd antibody or antigen-binding fragment thereof, e.g., a Wnt surrogate, administered or provided to the subject is in the range of about 0.01 mg/kg to about 50 mg/kg, 0.1 mg/kg to about 500 mg/kg, or about 0.1 mg/kg to about 50 mg/kg of the subject's body weight.

[0210] The terms “treatment”, “treating” and the like are used herein to generally mean obtaining a desired pharmacologic and/or physiologic effect. The effect may be prophylactic in terms of completely or partially preventing a disease or symptom thereof, e.g. reducing the likelihood that the disease or symptom thereof occurs in the subject, and/or may be therapeutic in terms of a partial or complete cure for a disease and/or adverse effect attributable to the disease. “Treatment” as used herein covers any treatment of a disease in a mammal, and includes: (a) preventing the disease from occurring in a subject which may be predisposed to the disease but has not yet been diagnosed as having it; (b) inhibiting the disease, i.e., arresting its development; or (c) relieving the disease, i.e., causing regression of the disease. The therapeutic agent (e.g., anti-Fzd antibody or antigen-binding fragment thereof) may be administered before, during or after the onset of disease or injury. The treatment of ongoing disease, where the treatment stabilizes or reduces the undesirable clinical symptoms of the patient, is of particular interest. Such treatment is desirably performed prior to complete loss of function in the affected tissues. The subject therapy will desirably be administered during the symptomatic stage of the disease, and in some cases after the symptomatic stage of the disease. In some embodiments, the subject method results in a therapeutic benefit, e.g., preventing the development of a disorder, halting the progression of a disorder, reversing the progression of a disorder, etc. In some embodiments, the subject method comprises the step of detecting that a therapeutic benefit has been achieved. The ordinarily skilled artisan will appreciate that such measures of therapeutic efficacy will be applicable to the particular disease being modified, and will recognize the appropriate detection methods to use to measure therapeutic efficacy.

[0211] Promoting Cell, Tissue and Organoid Growth and Related Methods

[0212] Other embodiments relate, in part, to the use of the Wnt surrogate molecules disclosed herein to promote or enhance the growth or proliferation of cells, tissues and organoids, for example, by contacting cells or tissue with one or more Wnt surrogate, optionally in combination with a Norrin or Rspondin polypeptide. In certain embodiments, the cells or tissue are contacted ex vivo, in vitro, or in vivo. Such methods may be used to generate cells, tissue or organoids for therapeutic use, e.g., to be transplanted or grafted into a subject. They may also be used to generate cells, tissue or organoids for research use. The Wnt surrogate molecules have widespread applications in non-therapeutic methods, for example in vitro research methods.

[0213] The invention provides a method for tissue regeneration of damaged tissue, such as the tissues discussed above, comprising administering a Wnt surrogate molecule to cells. The Wnt surrogate molecule may be administered directly to the cells in vivo, administered to a subject orally, intravenously; or by other methods known in the art, or administered to ex vivo cells. In some embodiments where the Wnt surrogate molecule is administered to ex vivo cells, these cells may be transplanted into a subject before, after or during administration of the Wnt surrogate molecule.

[0214] Wnt signaling is a key component of stem cell culture. For example, the stem cell culture media as described in WO2010/090513, WO2012/014076, Sato et al., 2011 (GASTROENTEROLOGY 2011; 141: 1762-1772) and Sato et al., 2009 (Nature 459, 262-5). The Wnt surrogate molecules disclosed herein are suitable alternatives to Rspondin for use in these stem cell culture media, or may be combined with Rspondin.

[0215] Accordingly, in one embodiment, the disclosure provides a method for enhancing the proliferation of stem cells comprising contacting stem cells with one or more Writ surrogate molecules disclosed herein. In one embodiment, the disclosure provides a cell culture medium comprising one or more Wnt surrogate molecules disclosed herein. In some embodiments, the cell culture medium may be any cell culture medium already known in the art that normally comprises Wnt or Rspondin, but wherein the Wnt or Rspondin is replaced (wholly or partially) or supplemented by Writ surrogate molecule(s) disclosed herein. For example, the culture medium may be as described in as described in WO2010/090513, WO2012/014076, Sato et at, 2011 (GASTROENTEROLOGY 2011; 141: 1762-1772) and Sato et at, 2009 (Nature 459, 262-5), which are hereby incorporated by reference in their entirety.

[0216] Stem cell culture media often comprise additional growth factors. This method may thus additionally comprise supplying the stem cells with a growth factor. Growth factors commonly used in cell culture medium include epidermal growth factor (EGF, (Peprotech), Transforming Growth Factor-alpha (TGF-alpha, Peprotech), basic Fibroblast Growth Factor (bFGF, Peprotech), brain-derived neurotrophic factor (BDNF, R&D Systems), Hepatocyte Growth Factor (HGF) and Keratinocyte Growth Factor (KGF, Peprotech, also known as FGF7). EGF is a potent mitogenic factor for a variety of cultured ectodermal and mesodermal cells and has a profound effect on the differentiation of specific cells in vivo and in vitro and of some fibroblasts in cell culture. The EGF precursor exists as a membrane-bound molecule which is proteolytically cleaved to generate the 53-amino acid peptide hormone that stimulates cells. EGF or other mitogenic growth factors may thus be supplied to the stem cells. During culturing of stem cells, the mitogenic growth factor may be added to the culture medium every second day, while the culture medium is refreshed preferably every fourth day. In general, a mitogenic factor is selected from the groups consisting of: i) EGF, TGF-alpha, and KGF, ii) EGF, TGF-alpha, and FGF7; iii) EGF, TGF-alpha, and FGF; iv) EGF and KGF; v) EGF and FGF7; vi) EGF and a FGF; vii) TGF-alpha and KGF; viii) TGF-alpha, and FGF7; ix) or from TGF-alpha and a FGF. In certain embodiments, the disclosure includes a stem cell culture media comprising a Wnt surrogate molecule disclosed herein, e.g., optionally in combination with one or more of the growth factors or combinations thereof described herein.

[0217] These methods of enhancing proliferation of stem cells can be used to grow new organoids and tissues from stem cells, as for example described in WO20101090513 WO2012/014076, Sato et at, 2011 (GASTROENTEROLOGY 2011; 141: 1762-1772) and Sato et al., 2009 (Nature 459, 262-5).

[0218] In some embodiments, the Wnt surrogate molecules are used to enhance stem cell regeneration. Illustrative stem cells of interest include but are not limited to; muscle satellite cells; hematopoietic stem cells and progenitor cells derived therefrom (U.S. Pat. No. 5,061,620), neural stem cells (see Morrison et al, (1999) Cell 96: 737-749); embryonic stem cells; mesenchymal stem cells: mesodermal stem cells; liver stem cells; adipose-tissue derived stem cells, etc.

[0219] Diagnostic and Related Methods

[0220] Other embodiments of the present invention relate, in part, to diagnostic applications for detecting the presence of cells or tissues expressing one or more Fzd receptors. Thus, the present disclosure provides methods of detecting one or more Fzd receptor in a sample, such as detection of cells or tissues expressing Fzd1. Such methods can be applied in a variety of known detection formats, including, but not limited to immunohistochemistry (IHC), immunocytochemistry (ICC), in situ hybridization (ISH), whole-mount in situ hybridization (WISH), fluorescent DNA in situ hybridization (FISH), flow cytometry, enzyme immuno-assay (EIA), and enzyme linked immuno-assay (ELISA). In particular embodiments, a method comprises contacting a tissue or cell, e.g., obtained from a subject, with an antibody or antigen-binding fragment thereof disclosed herein, and then determining an amount of binding of the antibody or antigen-binding fragment thereof to the tissue or cell, thus determining the presence of or an amount of the Fzd receptor(s) in the tissue or cell.

[0221] ISH is a type of hybridization that uses a labeled complementary DNA or RNA strand (i.e., primary binding agent) to localize a specific DNA or RNA sequence in a portion or section of a cell or tissue (in situ), or if the tissue is small enough, the entire tissue (whole mount ISH). One having ordinary skill in the art would appreciate that this is distinct from immunohistochemistry, which localizes proteins in tissue sections using an antibody as a primary binding agent. DNA ISH can be used on genomic DNA to determine the structure of chromosomes. Fluorescent DNA ISH (FISH) can, for example, be used in medical diagnostics to assess chromosomal integrity. RNA ISH (hybridization histochemistry) is used to measure and localize mRNAs and other transcripts within tissue sections or whole mounts.

[0222] In various embodiments, the antibodies and antigen-binding fragments thereof described herein are conjugated to a detectable label that may be detected directly or indirectly. In this regard, an antibody “conjugate” refers to an anti-Fzd antibody or antigen-binding fragment thereof that is covalently linked to a detectable label. In the present invention, DNA probes, RNA probes, monoclonal antibodies, antigen-binding fragments thereof, and antibody derivatives thereof, such as a single-chain-variable-fragment antibody or an epitope tagged antibody, may all be covalently linked to a detectable label. In “direct detection”, only one detectable antibody is used, i.e., a primary detectable antibody. Thus, direct detection means that the antibody that is conjugated to a detectable label may be detected, per se, without the need for the addition of a second antibody (secondary antibody).

[0223] A “detectable label” is a molecule or material that can produce a detectable (such as visually, electronically or otherwise) signal that indicates the presence and/or concentration of the label in a sample. When conjugated to an antibody, the detectable label can be used to locate and/or quantify the target to which the specific antibody is directed. Thereby, the presence and/or concentration of the target in a sample can be detected by detecting the signal produced by the detectable label. A detectable label can be detected directly or indirectly, and several different detectable labels conjugated to different specific-antibodies can be used in combination to detect one or more targets.

[0224] Examples of detectable labels, which may be detected directly, include fluorescent dyes and radioactive substances and metal particles. In contrast, indirect detection requires the application of one or more additional antibodies, i.e., secondary antibodies, after application of the primary antibody. Thus, the detection is performed by the detection of the binding of the secondary antibody or binding agent to the primary detectable antibody. Examples of primary detectable binding agents or antibodies requiring addition of a secondary binding agent or antibody include enzymatic detectable binding agents and hapten detectable binding agents or antibodies.

[0225] In some embodiments, the detectable label is conjugated to a nucleic acid polymer which comprises the first binding agent (e.g., in an ISH, WISH, or FISH process). In other embodiments, the detectable label is conjugated to an antibody which comprises the first binding agent (e.g., in an IHC process).

[0226] Examples of detectable labels which may be conjugated to antibodies used in the methods of the present disclosure include fluorescent labels, enzyme labels, radioisotopes, chemiluminescent labels, electrochemiluminescent labels, bioluminescent labels, polymers, polymer particles, metal particles, haptens, and dyes.

[0227] Examples of fluorescent labels include 5-(and 6)-carboxyfluorescein, 5- or 6-carboxyfluorescein, 6-(fluorescein)-5-(and 6)-carboxamido hexanoic acid, fluorescein isothiocyanate, rhodamine, tetramethylrhodamine, and dyes such as Cy2, Cy3, and Cy5, optionally substituted coumarin including AMCA, PerCP, phycobiliproteins including R-phycoerythrin (RPE) and allophycoerythrin (APC), Texas Red, Princeton Red, green fluorescent protein (GFP) and analogues thereof, and conjugates of R-phycoerythrin or allophycoerythrin, inorganic fluorescent labels such as particles based on semiconductor material like coated CdSe nanocrystallites.

[0228] Examples of polymer particle labels include micro particles or latex particles of polystyrene, PMMA or silica, which can be embedded with fluorescent dyes, or polymer micelles or capsules which contain dyes, enzymes or substrates.

[0229] Examples of metal particle labels include gold particles and coated gold particles, which can be converted by silver stains. Examples of haptens include DNP, fluorescein isothiocyanate (FITC), biotin, and digoxigenin. Examples of enzymatic labels include horseradish peroxidase (HRP), alkaline phosphatase (ALP or AP), β-galactosidase (GAL), glucose-6-phosphate dehydrogenase, β-N-acetylglucosamimidase, β-glucuronidase, invertase, Xanthine Oxidase, firefly luciferase and glucose oxidase (GO). Examples of commonly used substrates for horseradishperoxidase include 3,3′-diaminobenzidine (DAB), diaminobenzidine with nickel enhancement, 3-amino-9-ethylcarbazole (AEC), Benzidine dihydrochloride (BDHC), Hanker-Yates reagent (HYR), Indophane blue (IB), tetramethylbenzidine (TMB), 4-chloro-1-naphtol (CN), .alpha.-naphtol pyronin (.alpha.-NP), o-dianisidine (OD), 5-bromo-4-chloro-3-indolylphosp-hate (BCIP), Nitro blue tetrazolium (NBT), 2-(p-iodophenyl)-3-p-nitropheny-I-5-phenyl tetrazolium chloride (INT), tetranitro blue tetrazolium (TNBT), 5-bromo-4-chloro-3-indoxyl-beta-D-galactoside/ferro-ferricyanide (BCIG/FF).

[0230] Examples of commonly used substrates for Alkaline Phosphatase include Naphthol-AS-B 1-phosphate/fast red TR (NABP/FR), Naphthol-AS-MX-phosphate/fast red TR (NAMP/FR), Naphthol-AS-B1-phosphate/-fast red TR (NABP/FR), Naphthol-AS-MX-phosphate/fast red TR (NAMP/FR), Naphthol-AS-B1-phosphate/new fuschin (NABP/NF), bromochloroindolyl phosphate/nitroblue tetrazolium (BCIP/NBT), 5-Bromo-4-chloro-3-indolyl-b-d-galactopyranoside (BCIG).

[0231] Examples of luminescent labels include luminol, isoluminol, acridinium esters, 1,2-dioxetanes and pyridopyridazines. Examples of electrochemiluminescent labels include ruthenium derivatives. Examples of radioactive labels include radioactive isotopes of iodide, cobalt, selenium, tritium, carbon, sulfur and phosphorous.

[0232] Detectable labels may be linked to the antibodies described herein or to any other molecule that specifically binds to a biological marker of interest, e.g., an antibody, a nucleic acid probe, or a polymer. Furthermore, one of ordinary skill in the art would appreciate that detectable labels can also be conjugated to second, and/or third, and/or fourth, and/or fifth binding agents or antibodies, etc. Moreover, the skilled artisan would appreciate that each additional binding agent or antibody used to characterize a biological marker of interest may serve as a signal amplification step. The biological marker may be detected visually using, e.g., light microscopy, fluorescent microscopy, electron microscopy where the detectable substance is for example a dye, a colloidal gold particle, a luminescent reagent. Visually detectable substances bound to a biological marker may also be detected using a spectrophotometer. Where the detectable substance is a radioactive isotope detection can be visually by autoradiography, or non-visually using a scintillation counter. See, e.g., Larsson, 1988, Immunocytochemistry: Theory and Practice, (CRC Press, Boca Raton, Fla.); Methods in Molecular Biology, vol. 80 1998, John D. Pound (ed.) (Humana Press, Totowa, N.J.).

[0233] The invention further provides kits for detecting one or more Fzd receptor or cells or tissues expressing one or more Fzd receptors in a sample, wherein the kits contain at least one antibody, polypeptide, polynucleotide, vector or host cell as described herein. In certain embodiments, a kit may comprise buffers, enzymes, labels, substrates, beads or other surfaces to which the antibodies of the invention are attached, and the like, and instructions for use.

[0234] All of the above U.S. patents, U.S. patent application publications, U.S. patent applications, foreign patents, foreign patent applications and non-patent publications referred to in this specification and/or listed in the Application Data Sheet, are incorporated herein by reference, in their entirety.

[0235] From the foregoing it will be appreciated that, although specific embodiments of the invention have been described herein for purposes of illustration, various modifications may be made without deviating from the spirit and scope of the invention. Accordingly, the invention is not limited except as by the appended claims.

### EXAMPLES

### Example 1

### Characterization of Anti-Fzd Antibodies

[0236] Antibody Fab, scFv and VHH or sdAb fragments disclosed herein were sequenced and sub-cloned into mammalian expression vectors for expression, purification, and characterization of binding affinities to various Fzd receptors.

[0237] Soluble recombinant proteins were prepared by transfection of respective expression vectors into Expi293F cells (Thermo Fisher Scientific, Waltham, Mass.) according to the manufacturer's instructions. Briefly, four days after the transfection, cell culture medium was collected after spin down the cell pellet. The media were incubated with either Protein A resin (REPLIGEN, Waltham, Mass.) for collecting proteins containing human IgG-Fc portion, or Nickel affinity resin (Roche, Basel, Switzerland) for collecting proteins conjugated with His-tag. Proteins were eluted with 10 mM glycine, pH 3.5 from Protein A resin, or with 150 mM imidazole, pH 7.4 from Nickel affinity resin, respectively.

[0238] Subsequently, the protein elutes were fractionated and further purified by size-exclusion chromatography (SEC). SEC was performed by a fast protein liquid chromatography using a Superdex 200 Increase 10/300 GL (GE Healthcare, Pittsburgh, Pa.) in HBS buffer (10 mM HEPES, 150 mM NaCl, pH7.4). Each protein was injected onto the column at a volume of 475 μl or 500 μl. The absorbance at 280 nm was monitored, and the 500 μl fractions of all elutes were collected. Each collected faction near main peak was further analyzed by SDS-Polyacrylamide Gel Electrophoresis (SDS-PAGE) to confirm the content. SDS-PAGE was performed using Tris-HCl 4-15% gel (Bio-Rad, Hercules, Calif.) under both non-reducing and reducing conditions. The samples were prepared in Laemmli sample buffer and heated at 100° C. for 5 min.

[0239] Protein concentrations were determined using a NanoDrop Spectrophotometer (Thermo Scientific) by the direct UV A280 method. The relationship of absorbance to protein concentration is linear based on Beer-Lamber equation, A=ε l c; A is the absorbance value, ε is the wavelength-dependent extinction coefficient, l is the path length in centimeters, and c is the protein concentration. The experimental extinction coefficients of all produced proteins were estimated by their amino acid sequences.

[0240] Binding kinetics of antibody fragments to a variety of Fzd cysteine rich domain (CRD) protein targets (Fzd1, Fzd2, Fzd3, Fzd4, Fzd5, Fzd6, Fzd7, Fzd8, Fzd9 and/or Fzd10 CRDs) was determined by bio-layer interferometry (BLI) using Octet Red 96 (PALL ForteBio, Fremont, Calif.) instruments at 30° C., 1000 rpm with streptavidin (SA) biosensors. C-terminal biotinylated Fzd CRD recombinant protein was diluted to 20 nM in the running buffer (PBS, 0.05% Tween-20, 0.5% BSA, pH 7.2) and captured to the SA biosensor until coupling length reached 0.2 nm. Following capture of the Fzd CRD, the SA biosensor with captured biotinylated-Fzd CRD was dipped into wells containing the relevant antibody fragment at 7 different concentrations (0, 1.37, 4.12, 12.4, 37, 111.1, 333.3, 1000 nM) in running buffer, plus a well with only running buffer as a reference channel. K_{D} was determined by global fitting, 1:1 binding model according to manufacturer recommended settings.

[0241] Table 1A provides the heavy chain CDRs (CDRH1, CDRH2, and CDRH3) and light chain CDRs (CDRL1, CDRL2, and CDRL3) for the indicated antibody clones. The Abgenesis software from Distributed Bio was used to map the specificity determining regions (SDRs) shown below, which include the Kabat definition of CDRs (Padlan et al. FASEB J. 9, 133-139 (1995).

[0242] Where light chain CDRs are not provided, the antibody fragment did not comprise a light chain, e.g., the antibody was an Fab or VHH or sdAb. Table 1A also indicates the initial Fzd receptor the antibody fragment was shown to bind. The Fzd receptor to which each clone was initially identified as binding was determined by detection of phage-displayed antibody fragments bound to target antigen immobilized on Nunc Maxisorb microtiter plates (Thermo Fisher Scientific, Waltham, Mass.) by single-dose or dose-dependent ELISA. Detection of bound phage was determined calorimetrically by turnover of TMB substrate (Thermo Fisher Scientific, Waltham, Mass.) at 415 nm by anti-M13-HRP antibody (GE Healthcare, Pittsburgh, Pa.). Clones were identified as binding to a Fzd receptor when the fold OD 450 nm over background was greater than a threshold level.

TABLE 1A
Clone IDs and CDR sequences.

| | Initial | | CDRH1 | | CDRH2 | | CDRH3 | | CDRL1 | | CDRL2 | | CDRL3 |
|---|---|---|---|---|---|---|---|---|---|---|---|---|---|
| Clone ID | Binding | CDRH1 | SEQ ID | CDRH2 | SEQ ID | CDRH3 | SEQ ID | CDRL1 | SEQ ID | CDRL2 | SEQ ID | CDRL3 | SEQ ID |
| 001S-A01 | Fzd1 | YTFTSYGIS | 300 | GWISAYNGN | 477 | CARASAWTPYGAFD | 649 | SGSSSNIGSHT | 1052 | SNYQRPS | 1150 | CAAWDGSLF | 1159 |
| | | | | TNYA | | IW | | VS | | | | GHWVF | |
| 001S-B01 | Fzd1 | GSISSGGY | 195 | GSIYHSGSTYY | 454 | CARFYYDILTGYSYFD | 715 | RSSRSLLDTDD | 1040 | TLSHRAS | 1153 | CMQSIQLPW | 1188 |
| | | SWS | | N | | YW | | GNTYLD | | | | TF | |
| 001S-E01 | Fzd1 | GSISNYY | 194 | GEIDRSGDTN | 397 | CARVRARRFLVSDRS | 842 | SGNTLGSHYVS | 1051 | QD5KRPS | 1140 | CQVWDSSTV | 1323 |
| | | WS | | YN | | AFDIW | | | | | | VF | |
| 001S-F01 | Fzd1 | GSISGNNY | 193 | GSIYFTGGTYY | 454 | CARVMLITDAFDIW | 839 | RSSQSLLHSNG | 1036 | LGSNRAS | 1131 | CMQGTHWP | 1182 |
| | | YZG | | N | | | | YNYLD | | | | YTF | |
| 001S-G01 | Fzd1 | GSISSSSYY | 197 | GYIYYSGSTYY | 496 | CARATYGGDAFDIW | 657 | TRSSSNIGAGY | 1057 | GNSIRPS | 1114 | CGTWDSSLSA | 1161 |
| | | WG | | N | | | | DVH | | | | WVF | |
| 001S-H01 | Fzd1 | GSISSGGY | 196 | GYIYYSGSTYY | 496 | CARHAGFYGLADYF | 772 | RSSQSLLHSNG | 1036 | LGSKRAS | 1130 | CMQALQIPPT | 1174 |
| | | YWS | | N | | DYW | | YNYLD | | | | F | |
| 001S-A02 | Fzd1 | GSISSGGY | 196 | GYIYYSGSTYY | 496 | CARGKGYSYGYGKD | 742 | QASQDIGKYLN | 938 | DASNLET | 1081 | CQQNDYLPLT | 1223 |
| | | YWS | | N | | WFDPW | | | | | | F | |
| 001S-E02 | Fzd1 | GSISGNNY | 192 | GSIYFTGGTYY | 454 | CARVMLITDAFDIW | 839 | RSSQSLLHSNG | 1036 | LGSNRAS | 1131 | CMQGTHWP | 1182 |
| | | YWG | | N | | | | YNYLD | | | | YTF | |
| 001S-G02 | Fzd1 | GAISGTSY | 179 | GSIYYTGNTY | 455 | CARIGIAVAAPVDH | 779 | RASQSVGTYLT | 1008 | DASNRAT | 1084 | CMQATQFPL | 1178 |
| | | FWG | | YN | | W | | | | | | TF | |
| 001S-H02 | Fzd1 | GSISSSSYY | 197 | GYIYYSGSTYY | 496 | CARATYGGDAFDIW | 657 | TRSSSNIGAGY | 1057 | GNSIRPS | 1114 | CGTWDSSLSA | 1161 |
| | | WG | | N | | | | DVH | | | | WVF | |
| 001S-A03 | Fzd1 | GSISSGGY | 196 | GYIYYSGSTYY | 496 | CARVRDYYDSSGYYY | 843 | RASRSISSYFN | 1026 | AASSLQS | 1071 | CQQADTFPPT | 1206 |
| | | YWS | | N | | DYFDYW | | | | | | F | |
| 001S-B03 | Fzd1 | ASFSGHY | 72 | GEIDHTGSTN | 396 | CARGGQGGYDWGH | 732 | SGDKVGHKYA | 1050 | EDSQRPS | 1095 | CQAWDSSTD | 1194 |
| | | WT | | YE | | YHGLDVW | | S | | | | VVF | |
| 001S-H08 | Fzd5 | RAFTDNV | 239 | ATISGGGGST | 375 | CAAASSLTSTPYDLW | 575 | | | | | | |
| | | MA | | FDD | | | | | | | | | |
| 001S-A09 | Fzd5 | RSFRTNAL | 243 | AAISWTGGST | 331 | CNTVTYTGGSYKNY | 902 | | | | | | |
| | | G | | YYA | | W | | | | | | | |
| 001S-B09 | Fzd5 | SIDSINAM | 266 | AALTSGGITY | 337 | CNVITIVRGMGPRAY | 903 | | | | | | |
| | | A | | HA | | W | | | | | | | |
| 001S-C09 | Fzd5 | SIFSINAM | 267 | ATIQSGGRTN | 374 | CNVITIVRGMGPRAY | 903 | | | | | | |
| | | G | | YA | | W | | | | | | | |
| 001S-C07 | Fzd8 | YTFTSYGIS | 300 | GWISAYNGN | 477 | CARDGTPFYSGSYYG | 669 | QGDSLRTYYAS | 949 | GKNNRPS | 1113 | CNSRDNSGK | 1193 |
| | | | | TNYA | | SW | | | | | | HKVF | |
| 001S-D07 | Fzd8 | GTFSSYAI | 207 | GRIIPILGIANY | 438 | CARVPTSPYDILTGPF | 841 | RSSQSLLHSNG | 1034 | FGSYRAS | 1100 | CMQNLQTP | 1184 |
| | | S | | A | | DYW | | FNYVD | | | | WTF | |
| 001S-E07 | Fzd8 | ASVSSNSA | 73 | GRTYYRSKW | 451 | CARWKNYFDPW | 850 | RASQGIRSDLA | 967 | AASTLES | 1073 | CLQDYSYPRT | 1167 |
| | | AWN | | YNDYA | | | | | | | | F | |
| 001S-H07 | Fzd8 | FTFSSYA | 141 | STISGGGGST | 553 | CAKDLVPWGSSAFNI | 601 | RASQSVSSYLA | 1019 | GASSRAT | 1107 | CQQYGSSPPT | 1302 |
| | | MS | | YYA | | W | | | | | | F | |
| 004S-E05 | Fzd5 | FTFSTYEM | 156 | SGVSWNGSR | 525 | CARGQSEKWWSGL | 753 | RASQGISSALA | 973 | AASALQS | 1061 | CQQTYSTPRT | 1286 |
| | | N | | THYV | | YGMDVW | | | | | | F | |
| 004S-E03 | Fzd5 | GTFSTYAI | 210 | GWINSGNGN | 472 | CWTGLLWFGESTDA | 928 | RASQSISSYLN | 996 | AASSLQS | 1071 | CQQSYSTPLT | 1264 |
| | | S | | TKYS | | FDIW | | | | | | F | |
| 004S-G06 | Fzd5 | GTFTYRYL | 218 | GGIIPIFGTGN | 410 | CASSMVRVPYYYGM | 861 | RASQSISSYLN | 996 | AASSLQS | 1071 | CQQSYSTPLT | 1264 |
| | | H | | YA | | DVW | | | | | | F | |
| 001S-D09 | Fzd8 | GPFNLFA | 184 | AGISRTGGNT | 354 | CASKTTINSGWSREY | 855 | | | | | | |
| | | MG | | GYA | | HYW | | | | | | | |
| 001S-E09 | Fzd8 | GPFNLFA | 184 | AGISRTGGNT | 354 | CASKTTINSGWSREY | 855 | | | | | | |
| | | MG | | GYA | | HYW | | | | | | | |
| 001S-F09 | Fzd8 | GFFSSFTM | 181 | AAISRNGVYT | 318 | CNALAPGVRGSW | 884 | | | | | | |
| | | G | | RFA | | | | | | | | | |
| 001S-G09 | Fzd8 | SLFRLNG | 270 | ATISTRGTTH | 376 | CTDEESW | 908 | | | | | | |
| | | MG | | YA | | | | | | | | | |
| 001S-H09 | Fzd8 | GPFNLLA | 185 | AGISRTGGNT | 354 | CASKTTINSGWSREY | 855 | | | | | | |
| | | MG | | GYA | | HYW | | | | | | | |
| 001S-A10 | Fzd8 | SVVNFVV | 274 | AAITSGGSTN | 334 | CNRVGSREYSYW | 898 | | | | | | |
| | | MG | | YA | | | | | | | | | |
| 001S-B10 | Fzd8 | RTSDLYT | 262 | AAIGYKVKW | 313 | CNAVTYNGYTIW | 891 | | | | | | |
| | | MG | | NGERTYYL | | | | | | | | | |
| 001S-G12 | Fzd1 | SIFSSNTIY | 269 | ALITTSGNTN | 364 | CNAGAPAWTYRMG | 883 | | | | | | |
| | | | | YA | | TYYPQFGSW | | | | | | | |
| 002S-A01 | Fzd1 | STFSTYA | 272 | AAISGSGENT | 317 | CVKFGMNLGYSGYD | 925 | | | | | | |
| | | MG | | YYA | | YW | | | | | | | |
| 002S-B01 | Fzd1 | STFSNYA | 271 | AAISWGGGS | 320 | CAAGPIARWYRGD | 578 | | | | | | |
| | | MG | | TFYS | | MDYW | | | | | | | |
| 002S-C01 | Fzd1 | RMFSNYA | 241 | AAISSGGSGT | 319 | CAAGPIARWYRGD | 578 | | | | | | |
| | | MG | | YYS | | MDYW | | | | | | | |
| 002S-D01 | Fzd1 | RTDGGYV | 247 | ATVTWRTGT | 378 | CAAGPIARWYRGD | 578 | | | | | | |
| | | MG | | TYYA | | MDYW | | | | | | | |
| 002S-E01 | Fzd1 | RTFSSAA | 255 | AAISWSGSTA | 330 | CATLTPYGTVASY | 871 | | | | | | |
| | | MG | | YYA | | | | | | | | | |
| 002S-F01 | Fzd1 | RTFSSYA | 257 | AAVNWSGGS | 339 | CAAVFLSRNYEIQEY | 586 | | | | | | |
| | | MG | | TYYA | | YRYQ | | | | | | | |
| 002S-G01 | Fzd1 | RTFSSYA | 257 | AAISWSGGST | 327 | CAAGPIARWYRGD | 578 | | | | | | |
| | | MG | | YYA | | MDYW | | | | | | | |
| 002S-H01 | Fzd1 | RSFSTYP | 246 | TVISGSGGST | 574 | CAAGPIARWYRGD | 578 | | | | | | |
| | | MG | | YYS | | MDYW | | | | | | | |
| 002S-A02 | Fzd1 | RRFTTYG | 242 | AAVTWRSGS | 345 | CYLEGPLDVYW | 929 | | | | | | |
| | | MG | | TYYA | | | | | | | | | |
| 002S-B02 | Fzd1 | RTFNRHV | 251 | AAISWSGDST | 324 | CAKLGGSSWLREYD | 621 | | | | | | |
| | | MG | | YYA | | YW | | | | | | | |
| 002S-C02 | Fzd1 | RTFRAYA | 252 | SAISWSGGST | 510 | CAAGPIARWYRGD | 578 | | | | | | |
| | | MG | | YYA | | MDYW | | | | | | | |
| 002S-D02 | Fzd1 | RTFSEYA | 253 | AAISWSGGST | 326 | CNADSLRGIDYW | 881 | | | | | | |
| | | MG | | HYA | | | | | | | | | |
| 002S-E02 | Fzd1 | FTFREYA | 113 | SGISRDGGRT | 520 | CAPRVLVTAPSGGM | 631 | | | | | | |
| | | MT | | SYS | | DYW | | | | | | | |
| 002S-F02 | Fzd1 | GDFTNYA | 180 | AAVNWRGD | 338 | CAAVFLSRNYEIQEY | 586 | | | | | | |
| | | MA | | GTYYS | | YRYQ | | | | | | | |
| 002S-G02 | Fzd1 | RTFGTWA | 250 | AAISYNGFST | 333 | CAAGPIARWYRGD | 578 | | | | | | |
| | | MG | | YYS | | MDYW | | | | | | | |
| 002S-H02 | Fzd1 | RTFSSYA | 257 | AAISWSGGST | 327 | CAAGPIARWYRGD | 578 | | | | | | |
| | | MG | | YYA | | MDYW | | | | | | | |
| 002S-D03 | Fzd1 | RTFGSYA | 249 | AAISWSGGST | 327 | CAAGPIARWYRGD | 578 | | | | | | |
| | | MG | | YYA | | MDYW | | | | | | | |
| 002S-E03 | Fzd1 | SIFSIYAM | 268 | AVVATGGAT | 390 | CNMRGNWYREGRP | 897 | | | | | | |
| | | G | | NYA | | AEFLSW | | | | | | | |
| 002S-F03 | Fzd1 | RTSSSYA | 263 | AAISWSGGST | 327 | CAAGPIARWYRGD | 578 | | | | | | |
| | | MG | | YYA | | MDYW | | | | | | | |
| 002S-G03 | Fzd1 | RTFGSYA | 249 | AAISWSGGST | 327 | CAAGPIARWYRGD | 578 | | | | | | |
| | | MG | | YYA | | MDYW | | | | | | | |
| 002S-H03 | Fzd1 | QTFTAYA | 237 | AAISWSGSAT | 329 | CNAWVLVAGSRGTS | 893 | | | | | | |
| | | MG | | HYA | | ADYW | | | | | | | |
| 002S-A04 | Fzd1 | RTFSSYA | 257 | AAISWSGRST | 328 | CAAGPIARWYRGD | 578 | | | | | | |
| | | MG | | YYA | | MDYW | | | | | | | |
| 002S-B04 | Fzd1 | RTFSSYA | 257 | AAISWSGGST | 327 | CAAGPNYSWFMPSS | 579 | | | | | | |
| | | MG | | YYA | | SRLIW | | | | | | | |
| 002S-C04 | Fzd1 | RRFTTYG | 242 | AAVTWRAGS | 344 | CSADKLDYLDDQPFK | 907 | | | | | | |
| | | MG | | TYYA | | TWDYW | | | | | | | |
| 002S-D04 | Fzd1 | GTSSTYA | 220 | AAINRSGGST | 314 | CAAVFLSRNYEIQEY | 586 | | | | | | |
| | | MG | | YYA | | YRYQ | | | | | | | |
| 002S-E04 | Fzd1 | GTFSTYA | 211 | AAISWSGDST | 325 | CAAGPIARWYRGD | 578 | | | | | | |
| | | MG | | YYL | | MDYW | | | | | | | |
| 004S-H04 | Fzd5 | GTFSSYAI | 207 | GWISTYNGA | 484 | CARGGAGRFGEGM | 723 | RASQSISSYLN | 996 | AASSLQS | 1071 | CQQSYSTPLT | 1264 |
| | | S | | TNYA | | DVW | | | | | | F | |
| 001S-A04 | Fzd5 | YTFTSYGIS | 300 | GWISAYNGN | 477 | CASSKEKATYYYGM | 860 | GLSSGSVSTNY | 931 | YINTRSS | 1157 | CLLYLGRGIW | 1165 |
| | | | | TNYA | | DVW | | YPS | | | | VF | |
| 001S-D03 | Fzd5 | GTFSSYAI | 207 | GRIIPILGIANY | 438 | CARLDPGYYYGMDV | 783 | TGTSSDVGGY | 1055 | DVTKRPS | 1092 | CFSYAGSRF | 1160 |
| | | S | | A | | W | | NSVS | | | | | |
| 001S-F03 | Fzd5 | GTFSSYAI | 207 | GGIIPIFGTAN | 408 | CARVIFSTVTTTNDI | 836 | TRSSGSIASNY | 1056 | ENDKRPS | 1096 | CQSYDYDHR | 1322 |
| | | S | | YA | | W | | VQ | | | | WVF | |
| 004S-E04 | Fzd5 | YTFSGYYL | 284 | GTVTPILGTA | 456 | CARVDGSGYYGIDY | 830 | RASQSISSYLN | 996 | AASSLQS | 1071 | CQQSYSTPLT | 1264 |
| | | H | | NYA | | W | | | | | | F | |
| 004S-A06 | Fzd5 | GSFSNYAI | 190 | GRIIPILGSAN | 439 | CARTYLKAFDIW | 827 | RASQSISSYLN | 996 | AASSLQS | 1071 | CQQSYSTPLT | 1264 |
| | | S | | YA | | | | | | | | F | |
| 004S-F04 | Fzd5 | YTFTNNF | 292 | GRINPNSGGT | 446 | CARDRFDNWFDPW | 685 | RASQGISSALA | 973 | AASTLQS | 1075 | CQQSYNTPW | 1243 |
| | | MH | | NYA | | | | | | | | TF | |
| 001S-CO3 | Fzd5 | GTFSSYAI | 207 | GRIIPILGIANY | 438 | CAREGRSRVYGGNS | 705 | RSSQSLLRRNG | 1037 | MGSNRAP | 1132 | CMHGLHPPF | 1173 |
| | | S | | A | | FDYW | | HNYVD | | | | TF | |
| 003S-A01 | Fzd1 | YIFTDYYM | 278 | GGIIPIFGTAN | 408 | CARMSSDYYDSSGY | 792 | RASQGISNNLN | 969 | GASTLQS | 1109 | CQQADSFPPT | 1205 |
| | | H | | YA | | YRRGMDVW | | | | | | F | |
| 003S-E01 | Fzd1 | YIFTDYYM | 278 | GGIIPIFGTAN | 408 | CARAWKGLWFGEG | 658 | RASQSISSYLN | 996 | AASSLQS | 1071 | CQQSYSTPLT | 1264 |
| | | H | | YA | | TFDYW | | | | | | F | |
| 003S-F01 | Fzd1 | GTFSSYAI | 207 | GWINAGNGN | 465 | CARLAFDIW | 782 | RASQSISSYLN | 996 | AASSLQS | 1071 | CQQSYSTPLT | 1264 |
| | | S | | TTYA | | | | | | | | F | |
| 003S-A02 | Fzd1 | YTFTGYY | 288 | GWINAGNGN | 465 | CAKDRGNYGDYLDY | 604 | RASQGISNYLA | 971 | EVSSVQG | 1098 | CQQSYSTPLA | 1262 |
| | | MH | | TTYA | | W | | | | | | F | |
| 003S-C02 | Fzd1 | FTFSNSD | 128 | ALISYDGSHT | 363 | CTRGSRIGWFDPW | 912 | RASQSIGRWLA | 982 | AASRLQS | 1067 | CQQGFNFPLT | 1217 |
| | | MN | | YYA | | | | | | | | F | |
| 003S-E02 | Fzd1 | GTFSSYTIS | 208 | GGIIPISGKTD | 414 | CARARGGDSPLSL | 646 | RASQGISNNLN | 969 | TASSLQS | 1152 | CLQDYSYPYT | 1168 |
| | | | | YA | | | | | | | | F | |
| 003S-F02 | Fzd1 | GTFRSYAI | 204 | GGIIPIFGTAN | 408 | CARGGWRPDYYGS | 737 | RASQSVSSDLA | 1013 | GASTRAT | 1111 | CQQYETWPV | 1297 |
| | | N | | YA | | GSYYSFDYW | | | | | | LTF | |
| 003S-G02 | Fzd1 | FTFGTYW | 110 | SGITGSGGRT | 523 | CARMKDWFGAFDI | 791 | RASESVSSSS | 953 | GASTRAT | 1111 | CQQYNNWP | 1312 |
| | | VT | | FYA | | W | | FA | | | | PNYTF | |
| 003S-C03 | Fzd1 | FTFSRYA | 134 | SYISGDSGYT | 566 | CARGLVIATNWFDP | 746 | QANQDISNYL | 935 | AASSLQS | 1071 | CQQTYNPPR | 1281 |
| | | MS | | NYA | | W | | N | | | | TF | |
| 003S-D03 | Fzd1 | YTFTSYYM | 301 | GWINTYNGN | 474 | CAESLTSTADW | 588 | RASQGISNNLN | 969 | AASSLQR | 1070 | CQQSYSTPFT | 1260 |
| | | H | | TNYP | | | | | | | | F | |
| 003S-E03 | Fzd1 | YIFTDYYM | 278 | GWVNPTTGN | 493 | CARNVEGATSFPEFD | 795 | RASQGISNNLN | 969 | SASNLQS | 1146 | CQQSYSPPPY | 1256 |
| | | H | | TGYA | | YW | | | | | | TF | |
| 003S-H03 | Fzd1 | GTFSSYAI | 207 | GGIIPIFGTAN | 408 | CAKDIGSSWYYYMD | 598 | RASQSISSYLN | 996 | AASSLQS | 1071 | CQQSYSTPLT | 1264 |
| | | S | | YA | | VW | | | | | | F | |
| 003S-A04 | Fzd1 | FTFGTYW | 110 | SGITGSGGRT | 523 | CARMKDWFGAFDI | 791 | RTSERSSISS | 1046 | GASTRAT | 1111 | CQQYNNWP | 1312 |
| | | VT | | FYA | | W | | FA | | | | RNYTF | |
| 003S-C04 | Fzd1 | FAVSSSY | 82 | ASIWFDGSN | 372 | CAPNESGNVDYW | 630 | RASQGISNNLN | 969 | KASSLEN | 1119 | CQQSYSTPHT | 1261 |
| | | MS | | QDYA | | | | | | | | F | |
| 003S-D04 | Fzd1 | FTFSSYA | 141 | SAISGSGGST | 507 | CARDHGSSWYQNT | 671 | QASQDIGNYL | 939 | DVSNLER | 1091 | CQHLNSYPPG | 1197 |
| | | MH | | YYA | | DAFDIW | | N | | | | DTF | |
| 003S-G04 | Fzd1 | FRFISHPIH | 91 | GRVIPILGVTN | 453 | CASSSDYGDYLKEPN | 863 | RASQSISSYLN | 996 | AASSLQS | 1071 | CQQSYSTPLT | 1264 |
| | | | | YA | | YGMDVW | | | | | | F | |
| 003S-D05 | Fzd2 | FTFSNYA | 130 | SAIGTGGGTY | 502 | CATAYRRPGGLDVW | 866 | RSSQSLLHSDG | 1032 | LGSNRAS | 1131 | CMQNTHWP | 1186 |
| | | MT | | YA | | | | KTYLY | | | | LTR | |
| 003S-E05 | Fzd2 | FTFSSYTM | 149 | GRIKSKANGG | 444 | CARGSSSWYDW | 760 | KSSQSLLHSDG | 932 | LGSNRAS | 1131 | CMQNTHWP | 1186 |
| | | S | | TTDYA | | | | KTYLY | | | | LTR | |
| 003S-A06 | Fzd2 | FTFADYG | 102 | SYISSGSYTIYY | 567 | CARGTFDWLLSPSYD | 762 | RASQGISNNLN | 969 | AASRLES | 1066 | CQQSYSTPLT | 1264 |
| | | MH | | S | | YW | | | | | | F | |
| 003S-C06 | Fzd2 | FTFSNYG | 131 | SAISNSGGST | 508 | CTSSFLTGSQP5GYW | 915 | RASQDISSYLA | 962 | AASSLQS | 1071 | CQQSYRTPLT | 1245 |
| | | MH | | YYA | | | | | | | | F | |
| 003S-G06 | Fzd2 | FTFSDYG | 121 | SSTSGSGGNS | 549 | CARHNPGYMGYYY | 774 | RASQSVSSNLA | 1014 | DASNRAT | 1084 | CQHRTSWPL | 1200 |
| | | MH | | KYS | | GMDVW | | | | | | TF | |
| 003S-H06 | Fzd2 | GTFSSYTIS | 208 | GLVDPEDGET | 429 | CTILPAAAAGTYYYY | 909 | RASQRVGNNL | 981 | DASIRAT | 1080 | CQQYKDWPT | 1307 |
| | | | | IYA | | GMDVW | | A | | | | F | |
| 003S-B07 | Fzd2 | FTFSDHY | 119 | SSITRTPSGGT | 546 | CARDGGYW | 665 | RASQSVGSYLA | 1007 | GSSNRAA | 1115 | CQQYGTSLLT | 1306 |
| | | MS | | TEYA | | | | | | | | F | |
| 003S-D07 | Fzd2 | YTFTNNF | 292 | GIINPSGGSTS | 422 | CARATSLGRRYCSST | 656 | QASQGISNNL | 946 | LGSDRAS | 1127 | CQQSYSTPFT | 1260 |
| | | MH | | YA | | SCYPRDAFDIW | | N | | | | F | |
| 003S-E07 | Fzd2 | YTFTNNF | 292 | GWINPNSGG | 470 | CARSVGEVGATMLG | 823 | RASQSISSYLN | 996 | AASSLQS | 1071 | CQQSYSTPFT | 1260 |
| | | MH | | TKYA | | IGVVVYWFDPW | | | | | | F | |
| 003S-A08 | Fzd2 | FTFSNYA | 130 | SAIGTGGGTY | 502 | CATAYRRPGGLDVW | 866 | RSSQSLLHSDG | 1032 | LGFNRAS | 1126 | CMQNTHWP | 1186 |
| | | MT | | YA | | | | KTYLY | | | | LTR | |
| 003S-C08 | Fzd2 | LTVSTNF | 234 | AGIGWDSTNI | 349 | CARDLVAARPSNWD | 679 | RASQGIRNDLG | 966 | GASTLQR | 1108 | CQQSYSTPRV | 1266 |
| | | MS | | GYA | | YW | | | | | | TF | |
| 003S-E08 | Fzd2 | FTFRNSA | 115 | STISGSGGSTY | 554 | CARGGGYSSSW | 726 | RSSRSLLHSDG | 1041 | LGSNRAS | 1131 | CMQSSHWPK | 1191 |
| | | MH | | YS | | | | KTYLY | | | | TF | |
| 003S-G09 | Fzd4 | FTFDHNP | 108 | SAIGAGGGTY | 500 | CASPTVTRR | 857 | RASQSISSYLN | 996 | AASSLQS | 1071 | CQQSYSTPLT | 1264 |
| | | MN | | YA | | | | | | | | F | |
| 003S-C10 | Fzd4 | GTFSSYAI | 207 | GWINAGNGN | 465 | CARHYYGSGSYPDW | 777 | RASQSISSYLN | 996 | AASSLQS | 1071 | CQQSYSTPLT | 1264 |
| | | S | | TTYA | | | | | | | | F | |
| 003S-D10 | Fzd4 | FNFGIYSM | 86 | SYISGDSGYT | 566 | CARVGPGGWFDPW | 833 | RASQGISSYLA | 974 | AASNLLG | 1063 | CQQTYSTPW | 1288 |
| | | T | | NYA | | | | | | | | TF | |
| 003S-E10 | Fzd4 | FTFSSYA | 141 | AGISASGGST | 351 | CARPSTTGTKAFDIW | 798 | RASQSIGSNLD | 983 | AASTLET | 1074 | CQQSYSVPDT | 1272 |
| | | MH | | YYA | | | | | | | | F | |
| 003S-All | Fzd4 | GTFSSYAI | 207 | GWINAGNGN | 465 | CARHYYGSGSYPDW | 777 | RASQSISZYZN | 1001 | ZASSLQS | 1158 | CQQSYSTPLT | 1264 |
| | | S | | TTYA | | | | | | | | F | |
| 003S-G11 | Fzd4 | GTFSSYAI | 207 | GRIIPIFGTVN | 437 | CARGARLDYW | 717 | RASQSISSYLN | 996 | AASSLQS | 1071 | CQQSYSTPLT | 1264 |
| | | S | | YA | | | | | | | | F | |
| 003S-H11 | Fzd4 | YTFTGYY | 288 | GGIIPIFGTPH | 411 | CASTDPSSGLDYW | 864 | RASQSIGSNLD | 983 | DASSLES | 1085 | CQQSFIMPLT | 1232 |
| | | MH | | VA | | | | | | | | F | |
| 003S-C12 | Fzd4 | GTFSSYAI | 207 | GWINPNSGG | 471 | CARGGSSDVR | 735 | RASQSISSYLN | 996 | AASSLQS | 1071 | CQQSYSTPLT | 1264 |
| | | S | | TNYA | | | | | | | | F | |
| 003S-F12 | Fzd4 | FTFSSYA | 141 | SVISTSGDTVL | 559 | CARGGSSDVR | 735 | RASQSISSYLN | 996 | AASSLQS | 1071 | CQQSYSTPLT | 1264 |
| | | MH | | YT | | | | | | | | F | |
| 004S-B01 | Fzd4 | GTFSSYAI | 207 | GIINPSGGSTS | 422 | CAKDGVVR | 595 | RAIQSISSYLN | 951 | AASSLQS | 1071 | CQQSYSTPLT | 1264 |
| | | S | | YA | | | | | | | | F | |
| 004S-C01 | Fzd4 | FTFSNHYT | 127 | STISSSGGRTF | 557 | CARASRIDGGWPIID | 651 | RASQDIRDELA | 959 | AASTLQS | 1075 | CQQADSFPLT | 1204 |
| | | S | | YA | | HL | | | | | | F | |
| 004S-D01 | Fzd4 | FTFTNYA | 161 | SAISGSGGST | 507 | CARATGFGTVVFDY | 654 | RASQSISSYLN | 996 | AASSLQS | 1071 | CQQSYSTPLT | 1264 |
| | | MS | | YYA | | W | | | | | | F | |
| 004S-E01 | Fzd4 | GTFSSYAI | 207 | GWINAGNGN | 465 | CARHYYGSGSYPDW | 777 | ZACLRIISYLN | 1059 | FASSLQS | 1099 | CQQSYSTPLT | 1264 |
| | | S | | TTYA | | | | | | | | F | |
| 004S-F01 | Fzd4 | GTFSSYAI | 207 | GWINAGNGN | 465 | CARDGVE | 670 | RASQGISNWL | 970 | DASSLQS | 1086 | CQQSHITPYT | 1235 |
| | | S | | TTYA | | | | A | | | | F | |
| 004S-H01 | Fzd4 | FTFSNYA | 129 | ALMSPDGTII | 365 | CAKGIVGDYGAFDI | 614 | RASQSISSYLN | 996 | AASSLQS | 1071 | CQQSYSTPLT | 1264 |
| | | MH | | YYA | | W | | | | | | F | |
| 004S-B02 | Fzd4 | FTFSSYG | 143 | SSINNSSRTVF | 537 | CAKDHLAVADAHGR | 597 | RASQSISSYLN | 996 | AASSLQS | 1071 | CQQSYSTPLT | 1264 |
| | | MH | | YA | | | | | | | | F | |
| 004S-E02 | Fzd4 | FTFSSYA | 141 | AVISYDGSNE | 383 | CAGGEVYEL | 589 | RASQSISSYLN | 996 | AASSLQS | 1071 | CQQSYSTPLT | 1264 |
| | | MH | | YYA | | | | | | | | F | |
| 004S-F02 | Fzd4 | FTFSTYA | 155 | AVISSDGNNK | 382 | CAAPDVVVTADGYY | 582 | RASQGISSALA | 973 | AASTLQS | 1075 | CQQANTVPF | 1214 |
| | | MH | | YYT | | W | | | | | | TF | |
| 004S-G02 | Fzd4 | FTFANYA | 104 | ALISYDGGTK | 362 | CAKTLVTSHALHIW | 625 | RASQSISSYLN | 996 | AASSLQS | 1071 | CQQSYSTPLT | 1264 |
| | | MN | | YYA | | | | | | | | F | |
| 004S-H02 | Fzd4 | FTFANYA | 103 | ALISYDGGNK | 361 | CAKTLVTSHALHIW | 625 | RASQSISSYLN | 996 | AASSLQS | 1071 | CQQSYSTPLT | 1264 |
| | | MH | | YYA | | | | | | | | F | |
| 001S-E03 | Fzd5 | GSFSGYY | 188 | GEINHSGSTN | 398 | CARGRRLVRFTVTSA | 755 | TGSSSNIGAGF | 1054 | SDRNRPS | 1149 | CQSYDSSLRA | 1321 |
| | | WH | | YN | | FDIW | | GVH | | | | SVF | |
| 001S-B05 | Fzd5 | GTFSSYAI | 207 | GGIIPILGIAN | 413 | CARIPKPRGYSYGDN | 780 | RSSQSLLHSNG | 1035 | LGSDRTS | 1128 | CMQSLQTPY | 1190 |
| | | S | | YA | | GSW | | NTYLD | | | | TF | |
| 004S-A07 | Fzd6 | GNFKNYG | 183 | GRIIPALGTA | 434 | CARQYCSGGSCYPD | 805 | RASQDIRSALA | 960 | QASSLIS | 1139 | CQQSYSMPQ | 1253 |
| | | IT | | NYA | | AFDIR | | | | | | TF | |
| 004S-B07 | Fzd6 | FTFSSYSM | 146 | GVISKDGDNK | 460 | CASSRDGYNRLAFDI | 862 | QASQDIRNYLN | 940 | AASSLQS | 1071 | CQQSSRFWT | 1238 |
| | | N | | YYA | | W | | | | | | F | |
| 004S-A08 | Fzd6 | GTFSSYAI | 207 | GRIIPILGIANY | 438 | CARDGGDYGMDV | 664 | RASQSISSYLN | 996 | AASSLQS | 1071 | CQQSYSTPLT | 1264 |
| | | S | | A | | W | | | | | | F | |
| 004S-B08 | Fzd6 | YTFTNNF | 292 | GRINPNSGGT | 446 | CASQNYYGSGSYPG | 858 | RASQSISSYLN | 996 | AASSLQS | 1071 | CQQSYSTPLT | 1264 |
| | | MH | | NYA | | FDYW | | | | | | F | |
| 004S-D08 | Fzd6 | YTFTYRYL | 303 | GGIIPIFGTAN | 408 | CATHDSSGYYSFDY | 870 | RASQSISSYLN | 996 | AASSLQS | 1071 | CQQSYSTPLT | 1264 |
| | | H | | YA | | W | | | | | | F | |
| 004S-E08 | Fzd6 | FSVSSNY | 101 | SAIGTGGGTY | 502 | CTTRTYDSSGYYETQ | 921 | RSSRSLLHSNG | 1042 | LGSNRAS | 1131 | CVQTTQSPLT | 1326 |
| | | MN | | YA | | NYYMDVW | | NTYLQ | | | | F | |
| 004S-G08 | Fzd6 | FTFSDYY | 122 | AAISYDESNK | 332 | CARSAVAGAFDIW | 813 | RASQSISSYLN | 996 | AASSLQS | 1071 | CQQSYSTPLT | 1264 |
| | | MS | | FYA | | | | | | | | F | |
| 004S-A09 | Fzd6 | FTFRDYA | 112 | SGISWNSGSI | 522 | CARRSGYSGSVYYYY | 810 | RASQSISSYLN | 996 | AASSLQS | 1071 | CQQSYSTPLT | 1264 |
| | | MN | | GYA | | GMDVW | | | | | | F | |
| 004S-B09 | Fzd6 | FTFSSFGM | 135 | AGINWNGGS | 350 | CARGPSHQHTFDIW | 751 | RASQGISSALA | 973 | AASSLQS | 1071 | CQQSYSHTAF | 1249 |
| | | H | | VVYA | | | | | | | | TF | |
| 004S-C09 | Fzd6 | YTFTNNF | 292 | GGFDPEDGET | 401 | CARVGRGYSFDYW | 834 | RASQSISSYLN | 996 | AASSLQS | 1071 | CQQSYSTPLT | 1264 |
| | | MH | | IYA | | | | | | | | F | |
| 004S-E09 | Fzd6 | DTFSNYVI | 77 | GRISAYNGYK | 447 | CARSSGYVGWFDP | 821 | RASQSISSYLN | 996 | AASSLQS | 1071 | CQQSYSTPLT | 1264 |
| | | S | | SYA | | W | | | | | | F | |
| 004S-F09 | Fzd6 | FTFSNYYT | 132 | SYISGAGGST | 565 | CARLPRRSGKGSAFD | 785 | RASQSISSYLN | 996 | AASSLQS | 1071 | CQQSYSTPLT | 1264 |
| | | S | | EYA | | IW | | | | | | F | |
| 004S-H09 | Fzd6 | GTFSSYTIS | 208 | GWMNPNSG | 490 | CARVGATSAGGMD | 832 | RASQSISSYLN | 996 | AASSLQS | 1071 | CQQSYSTPLT | 1264 |
| | | | | NTGYA | | VW | | | | | | F | |
| 004S-C10 | Fzd6 | YIFTDYYM | 278 | GLVDPEDGET | 429 | CAHSDFFSGLSFGD | 590 | RASQSISSYLN | 996 | AASSLQS | 1071 | CQQSYSTPLT | 1264 |
| | | H | | IYA | | W | | | | | | F | |
| 004S-D10 | Fzd6 | FTFSNSD | 128 | SSISTSGGSTY | 544 | CARGSYW | 761 | RASQNINNYLA | 979 | RASTLQS | 1143 | CQQYSSYPYT | 1317 |
| | | MN | | YA | | | | | | | | I | |
| 004S-E10 | Fzd6 | TTLNKYAI | 275 | GRITPVVGVT | 448 | CALSSSWYGGFDYW | 628 | RASQSISSYLN | 996 | AASSLQS | 1071 | CQQSYSTPLT | 1264 |
| | | S | | NYA | | | | | | | | F | |
| 004S-F10 | Fzd6 | GFTFSDHY | 182 | ALVGYDGSQ | 367 | CNTGIPMLYW | 900 | RASQSISSYLN | 996 | AASSLQS | 1071 | CQQSYSTPLT | 1264 |
| | | | | QFYG | | | | | | | | F | |
| 004S-G10 | Fzd6 | FTFSDYY | 122 | SAISGSGFTYY | 506 | CARVSRGFAFDYW | 845 | RASQSISSYLN | 996 | AASSLQS | 1071 | CQQSYSTPLT | 1264 |
| | | MS | | A | | | | | | | | F | |
| 004S-A11 | Fzd6 | GTFSSYAI | 207 | GRIIPILGIANY | 438 | CARESVNNYYYMDV | 710 | RASQSISSYLN | 996 | AASSLQS | 1071 | CQQSYSTPLT | 1264 |
| | | S | | A | | W | | | | | | F | |
| 004S-C11 | Fzd6 | FTFSSYA | 141 | ALTSYDGSKK | 366 | CAKTGRGYAFDIW | 623 | RASQSISSYLN | 996 | AASSLQS | 1071 | CQQSYSTPLT | 1264 |
| | | MH | | FYA | | | | | | | | F | |
| 004S-E11 | Fzd6 | FTFSSYN | 145 | GRIKSKANGG | 444 | CAKAGQQLDW | 593 | RASQSISSYLN | 996 | AASSLQS | 1071 | CQQSYSTPLT | 1264 |
| | | MN | | TTDYA | | | | | | | | F | |
| 004S-H11 | Fzd6 | FTFTSSAM | 162 | GGIIPIFGTAN | 408 | CATVQTNYYDSSGRF | 874 | RASQSISRWLA | 992 | AASSLQS | 1071 | CQQYVSYPLT | 1318 |
| | | Q | | YA | | SYRAHYFDYW | | | | | | F | |
| 004S-Al2 | Fzd6 | YTFTNNF | 292 | GRINPNSGGT | 446 | CARGQGYSSGWYR | 752 | RASQSISSYLN | 996 | AASSLQS | 1071 | CQQSYSTPLT | 1264 |
| | | MH | | NYA | | GDAFDIW | | | | | | F | |
| 004S-D12 | Fzd6 | FAFDDYA | 79 | GFIRSKAYGG | 399 | CAKDRGYSSGWYLD | 605 | RASQSISSYLN | 996 | AASSLQS | 1071 | CQQSYSTPLT | 1264 |
| | | MH | | TTEYA | | YW | | | | | | F | |
| 005S-H01 | Fzd7 | FNFSSYT | 87 | SVIYGGGNTN | 561 | CARGGSGGNLSYW | 733 | RASQSISSYLN | 996 | AASSLQS | 1071 | CQQSYSTPLT | 1264 |
| | | MR | | YA | | | | | | | | F | |
| 005S-A02 | Fzd7 | GTFSSYAI | 207 | GMIIPFLGITN | 430 | CTRPYDAFDIW | 913 | RASQSISSYLN | 996 | AASSLQS | 1071 | CQQSYSTPLT | 1264 |
| | | S | | YA | | | | | | | | F | |
| 005S-C02 | Fzd8 | YTFASYG | 283 | GWINAGNGN | 465 | CARLSVWKWEQVT | 787 | RASQSISSYLN | 996 | AASSLQS | 1071 | CQQSYSTPLT | 1264 |
| | | MH | | TTYA | | NWFDPW | | | | | | F | |
| 005S-E02 | Fzd8 | GTFTSYAI | 216 | GWINAGNGN | 464 | CTTGLFPYYRYNWN | 919 | RASQSISSYLN | 996 | AASSLQS | 1071 | CQQSYSTPLT | 1264 |
| | | S | | TKYS | | NDAFDIW | | | | | | F | |
| 005S-A03 | Fzd8 | GTFSSYAI | 207 | GWMNPNSG | 490 | CAKWHIGATGNWF | 626 | RASQSISSYLN | 996 | AASSLQS | 1071 | CQQSYSTPLT | 1264 |
| | | S | | NTGYA | | DPW | | | | | | F | |
| 005S-H03 | Fzd8 | YTFTNNF | 292 | GGIFPIYGIST | 403 | CARDRPTSSWYAFD | 689 | RASQGISNNLN | 969 | DASTLQT | 1089 | CQQSFSAPITF | 1233 |
| | | MH | | YA | | YW | | | | | | | |
| 005S-F04 | Fzd8 | FSFSSTAM | 95 | SYISSSGSITH | 568 | CARYGDYGDYW | 851 | RASQSISSYLN | 996 | AASSLQS | 1071 | CQQSYSTPLT | 1264 |
| | | S | | YA | | | | | | | | F | |
| 005S-H04 | Fzd8 | YTFTNNF | 292 | GWINAGNGN | 465 | CARVATGNAFDIW | 829 | RASQSISSYLN | 996 | AASSLQS | 1071 | CQQSYSTPLT | 1264 |
| | | MH | | TTYA | | | | | | | | F | |
| 005S-B05 | Fzd8 | FTFSSYW | 152 | AGISGSGKTT | 353 | CARGGLLFDYW | 728 | QASQDISNYLN | 943 | KASSLES | 1120 | CQQSYSTPRT | 1265 |
| | | MH | | FYA | | | | | | | | F | |
| 005S-F05 | Fzd8 | FTFTSSAV | 164 | GWMNPNSG | 490 | CARRTAVAGTIDYW | 811 | RASQSISSYLN | 996 | AASSLQS | 1071 | CQQSYSTPLT | 1264 |
| | | Q | | NTGYA | | | | | | | | F | |
| 005S-605 | Fzd8 | GTFSSYAI | 207 | GWISPYNGN | 480 | CARGGWTNYGGNL | 738 | RASQSISSYLN | 996 | AASSLQS | 1071 | CQQSYSTPLT | 1264 |
| | | S | | TNYA | | DYW | | | | | | F | |
| 005S-H05 | Fzd8 | YTFTSYYM | 301 | GRINPNSGGT | 446 | CARVPDFWSGYLDY | 840 | RASQGISRTLZ | 972 | AASSLQS | 1071 | CQQTYSMPIT | 1284 |
| | | H | | NYA | | W | | | | | | F | |
| 005S-D06 | Fzd8 | YTFTYRYL | 303 | GGIIPIFGTAN | 408 | CARDSYPYGMDVW | 697 | RASQSISSYLN | 996 | AASSLQS | 1071 | CQQSYSTPLT | 1264 |
| | | H | | YA | | | | | | | | F | |
| 005S-F06 | Fzd8 | GTFSSYAI | 207 | GRVIPILGVTN | 453 | CAREYLGSFDIW | 712 | RASQSVGSNLA | 1006 | GASSRAT | 1107 | CQQYGSSPPF | 1301 |
| | | S | | YA | | | | | | | | TF | |
| 005S-A07 | Fzd9 | FTFTGSAV | 160 | GGILPIYGTTK | 418 | CARGARLYGFDYW | 719 | RASQSVSRNLA | 1012 | GASTRAT | 1111 | CQQRSNWPI | 1226 |
| | | Q | | YA | | | | | | | | TF | |
| 005S-B07 | Fzd9 | FTFTSSAV | 164 | GWMNPNSG | 490 | CARGRGQQWLTGY | 754 | RASQGISSALA | 973 | GASTLQS | 1109 | CLQDYNYPFT | 1166 |
| | | Q | | NTGYA | | YGMDVW | | | | | | F | |
| 005S-C07 | Fzd9 | FTFSSYSM | 146 | SYIENDGSITT | 562 | CARAPYYYGSGSLFR | 645 | RASQSISSYLN | 996 | AASSLQS | 1071 | CQQSYSTPLT | 1264 |
| | | N | | YA | | LDYW | | | | | | F | |
| 005S-D07 | Fzd9 | GTFNSYAI | 203 | GGIIPIFGTAN | 408 | CARAGSGYYNFDYW | 637 | RASQSINRWL | 988 | AASSLQS | 1071 | CQQTYNIPITF | 1280 |
| | | A | | YA | | | | A | | | | | |
| 005S-F07 | Fzd9 | FSFSSYG | 96 | AYINSRGSLM | 392 | CAKTKLPIW | 624 | RASQSINRNYL | 987 | AASSRVT | 1072 | CQQYDSWPP | 1294 |
| | | MH | | YYA | | | | G | | | | TF | |
| 005S-G07 | Fzd9 | GSFSGYAI | 186 | GGIIPIFGTAN | 408 | CATGYYYDYYFDYW | 869 | RASQGISNNLN | 969 | AASSLQS | 1071 | CQHYYNLPLT | 1202 |
| | | N | | YA | | | | | | | | F | |
| 005S-H07 | Fzd9 | GTFTNNF | 214 | GLVDPEDGET | 429 | CARTYRIVGATPRYY | 828 | RASQTINNQLA | 1023 | KASNLET | 1118 | CQQANSFPV | 1210 |
| | | MH | | IYA | | YYGMDVW | | | | | | TF | |
| 005S-B08 | Fzd9 | YIFTDYYM | 278 | GWINPNSGG | 469 | CARGPRDSGYYPGG | 750 | RASQSISSYLN | 996 | AASSLQS | 1071 | CQQSYSTPLT | 1264 |
| | | H | | TIYA | | AFDIW | | | | | | F | |
| 005S-D08 | Fzd9 | FAFSSHW | 80 | SAIDGSGGST | 499 | CARDRQLGWAHWY | 691 | RASQSISSYLN | 996 | AASSLQS | 1071 | CQQSYSTPLT | 1264 |
| | | MH | | YYA | | FDLW | | | | | | F | |
| 005S-G08 | Fzd9 | YTFTGYY | 288 | GWINAGNGN | 465 | CARDRDYW | 684 | QTSQDINNNL | 950 | KASSLES | 1120 | CQQSYSSPPT | 1258 |
| | | MH | | TTYA | | | | N | | | | F | |
| 005S-C09 | Fzd9 | FTFSSYG | 143 | SAIGTGGGTY | 502 | CALLVGAARGISYYY | 627 | QASQDISNYLN | 943 | AASTLQS | 1075 | CLQHKSFPTF | 1170 |
| | | MH | | VA | | YYGMDVW | | | | | | | |
| 005S-D09 | Fzd9 | YTFTSYA | 298 | GWINAGNGN | 465 | CARDRPYSSGWYYP | 690 | RASQSVSSNQL | 1015 | GASTRAT | 1111 | CQQRYNWPP | 1230 |
| | | MH | | TTYA | | AFDIW | | A | | | | SITF | |
| 005S-E09 | Fzd9 | FNLRRYN | 89 | SRISNSGSLVY | 534 | CARDADSSGYYRYD | 659 | RASQSVSSNLA | 1014 | DASNRAT | 1084 | CQQRNNWLY | 1225 |
| | | MN | | YA | | AFDIW | | | | | | TF | |
| 005S-A10 | Fzd9 | YTFTDYY | 285 | GIINPSGGSTS | 422 | CARHVYGSGTYNN | 775 | RASQSISSYLN | 996 | AASSLQS | 1071 | CQQSYSTPLT | 1264 |
| | | MH | | YA | | WFDPW | | | | | | F | |
| 005S-010 | Fzd9 | YTFTSYYM | 301 | GWMSPNSA | 490 | CARGGPIHYYYYYY | 731 | RASQGISNNLN | 969 | AASTLQS | 1075 | CQQTNLFPYT | 1277 |
| | | H | | NTGYA | | MDVW | | | | | | F | |
| 005S-H10 | Fzd9 | GAFSTSSIS | 178 | GRIIPVLGTA | 443 | CAKGGWRSSFDPW | 612 | RASQSVSSNLA | 1014 | GASTRAT | 1111 | CQQYNSWPL | 1313 |
| | | | | NYA | | | | | | | | TF | |
| 005S-B11 | Fzd9 | YTFTSYDI | 299 | GGFDPEDGET | 401 | CAKAGDWGLYGMD | 592 | RASQSISRWLA | 992 | AASSLQS | 1071 | CQQTNTFPFT | 1278 |
| | | N | | IYA | | VW | | | | | | F | |
| 005S-C11 | Fzd9 | FTFTGSAV | 160 | GGILPIYGTTK | 418 | CARGARLYGFDYW | 719 | RASQSVSRKLA | 1011 | GASTRAT | 1111 | CQQRSNWPI | 1226 |
| | | Q | | YA | | | | | | | | TF | |
| 005S-D11 | Fzd9 | YTFTNNF | 292 | GWINPNSGD | 468 | CAREANYDILTGYIRP | 703 | RASQSLRSKLA | 1004 | GASTRAT | 1111 | CQQYANSPW | 1293 |
| | | MH | | TKFA | | DAFDIW | | | | | | TF | |
| 005S-E11 | Fzd9 | GTFSSYAI | 207 | GWINAGNGN | 464 | CTTTEYSSSPDYYYG | 922 | QASQDISNYLN | 943 | GASTLQS | 1109 | CQQLSRYPSL | 1222 |
| | | S | | TKYS | | MDVW | | | | | | F | |
| 005S-G11 | Fzd9 | GTFTRNSI | 215 | GGIIPIFGTAN | 408 | CARSSDLRIFDYW | 819 | RASQSVSSNLA | 1014 | GASNRPT | 1103 | CQQYGSSPYT | 1305 |
| | | S | | YA | | | | | | | | F | |
| 005S-H11 | Fzd10 | YTFASYDI | 282 | GWINAGNGN | 465 | CARDGIWDIFDYW | 666 | RASQSISSYLN | 996 | AASSLQS | 1071 | CQQSYSTPLT | 1264 |
| | | H | | TTYA | | | | | | | | F | |
| 005S-E12 | Fzd10 | YIFTDYYM | 278 | GVIFPVYPTP | 458 | CARGGSTGYYGMDV | 736 | RASQSVGRW | 1005 | AASSLQS | 1071 | CQQANTFPFT | 1213 |
| | | H | | DYA | | W | | MA | | | | F | |
| 005S-F12 | Fzd10 | GTFSSYAI | 207 | GRIVPIVDVV | 450 | CARDTCSSTSCSPDY | 698 | RASQSISSYLN | 996 | AASSLQS | 1071 | CQQSYSTPLT | 1264 |
| | | S | | KYA | | W | | | | | | F | |
| 006S-A01 | Fzd10 | FTFSSYSM | 146 | SAIGTGGGTY | 502 | CAREGWFGESPFGM | 707 | RASQSISSYLN | 996 | AASSLQS | 1071 | CQQSYSTPLT | 1264 |
| | | N | | YA | | DVW | | | | | | F | |
| 006S-F01 | Fzd10 | YTFTRYAV | 294 | GWISTFNDN | 483 | CASPTGMTTNFDYW | 856 | RASQSISSYLN | 996 | AASSLQS | 1071 | CQQSYSTPLT | 1264 |
| | | H | | TNYA | | | | | | | | F | |
| 006S-H01 | Fzd10 | YIFTDYYM | 278 | GGIIPIFGTAN | 408 | CAKGSYYYDSSGYY | 620 | RASQGISNNLN | 969 | AASNLET | 1062 | CQQTSSTPLT | 1279 |
| | | H | | YA | | WDAFDIW | | | | | | F | |
| 006S-A02 | Fzd10 | YIFTDYYM | 278 | GGIIPLFGTTD | 416 | CARDITGADGMDV | 672 | RASQSISSYLN | 996 | AASSLQS | 1071 | CQQSYSTPLT | 1264 |
| | | H | | YA | | W | | | | | | F | |
| 006S-D02 | Fzd10 | GTFSSYAI | 207 | GRIIPTVGTA | 442 | CARDVCSGGSCSPD | 699 | RASQGISNNLN | 969 | DASSLES | 1085 | CQQTYNTPRT | 1282 |
| | | S | | NYA | | VW | | | | | | F | |
| 006S-E02 | Fzd10 | FTFTSSAT | 163 | GGIIPIFGTAN | 408 | CARDGSSGWYSPNA | 667 | RASQGISNNLN | 969 | AASSLQS | 1071 | CLQHNGYPIT | 1171 |
| | | Q | | YA | | FDIW | | | | | | F | |
| 006S-H02 | Fzd10 | FTFRMYG | 114 | SRISPDGRTTT | 535 | CARSPRWYDAFDIW | 817 | RSSQSLLHSNG | 1036 | RVSSRFS | 1145 | CMQGTHWP | 1182 |
| | | MH | | YA | | | | YNYLD | | | | PTF | |
| 006S-A03 | Fzd10 | YIFTDYYM | 278 | GWINAGNGN | 465 | CARDPIMFGDQPG | 681 | RASESVSSNLA | 952 | GASSRAT | 1107 | CQQYNKSPSF | 1311 |
| | | H | | TTYA | | WFDPW | | | | | | | |
| 006S-B03 | Fzd10 | GTFSSYAI | 207 | GWINAGNGN | 463 | CAREGYDFWSGPYA | 708 | RASQTISRYLN | 1024 | EVSSLQG | 1097 | CQQSYSTPW | 1270 |
| | | S | | TKYA | | FDIW | | | | | | TF | |
| 006S-C03 | Fzd10 | GTFSSNVI | 205 | GGIIPIFGTAN | 408 | CARGGYYYGMDVW | 740 | RASQSISSYLN | 996 | AASSLQS | 1071 | CQQSYSTPLT | 1264 |
| | | S | | YA | | | | | | | | F | |
| 014S-B01 | Fzd1 | YIFTDYYM | 278 | GGIIPIFGTAN | 408 | CARMSSDYYDSSGY | 792 | RASQGISNNLN | 969 | GASTLQS | 1109 | CQQADSFPPT | 1205 |
| | | H | | YA | | YRRGMDVW | | | | | | F | |
| 014S-D01 | Fzd4 | GTFSSYAI | 207 | GWINAGNGN | 465 | CARHYYGSGSYPDW | 777 | RASQSISSHZN | 994 | AASSLQS | 1071 | CQQSYSTPLT | 1264 |
| | | S | | TTYA | | | | | | | | F | |
| 014S-E01 | Fzd4 | GTFSSYAI | 207 | GWINAGNGN | 465 | CARHYYGSGSYPDW | 777 | RASQSIZZYZN | 1003 | AASSLQS | 1071 | CQQSYSTPLT | 1264 |
| | | S | | TTYA | | | | | | | | F | |
| 014S-G01 | Fzd4 | GTFSSYAI | 207 | GWMNPNNG | 488 | CARHYYGSGNYRD | 776 | RASQSISSYLN | 996 | AASSLQS | 1071 | CQQSYSTPFT | 1260 |
| | | S | | NTTYA | | W | | | | | | F | |
| 014S-A02 | Fzd4 | FTFSSNA | 137 | SGISGSGGST | 515 | CAKPGIAAAGTNNW | 622 | RASQGISSALA | 973 | GASTVES | 1112 | CQQSYSTPRT | 1265 |
| | | MH | | YYA | | FDPW | | | | | | F | |
| 014S-B02 | Fzd4 | FTFSSYA | 141 | SGISGSGSSTY | 518 | CARPSTTSFGMDVW | 799 | RASQSVSSNLA | 1014 | GASTRAT | 1111 | CQQYDTPLRT | 1295 |
| | | MH | | YA | | | | | | | | F | |
| 014S-C02 | Fzd5 | YTFTSYYM | 301 | GRINPNSGGT | 446 | CARVPDFWSGYLDY | 840 | RASQGISSALA | 973 | AASSLQS | 1071 | CQQTYSMPIT | 1284 |
| | | H | | NYA | | W | | | | | | F | |
| 014S-D02 | Fzd5 | GTFSTYAI | 210 | GIINPSGGSTS | 422 | CARAKGSGWYVGSA | 641 | RASQSISSYLN | 996 | AASSLQS | 1071 | CQQSYSTPLT | 1264 |
| | | S | | YA | | FDIW | | | | | | F | |
| 014S-E02 | Fzd5 | FTFSDSY | 120 | GFIRSKAYGG | 399 | CARATQELLLPYGM | 655 | RASQSISSYLN | 996 | AASSLQS | 1071 | CQQSYSTPLT | 1264 |
| | | MS | | TTEYA | | DVW | | | | | | F | |
| 014S-F02 | Fzd5 | YTFTSYYM | 301 | GRINPNSGGT | 446 | CARVPDFWSGYLDY | 840 | RASQGVSTZLS | 977 | AASSLQS | 1071 | CQQTYSMPIT | 1284 |
| | | H | | NYA | | W | | | | | | F | |
| 014S-G02 | Fzd6 | YTFTSYYM | 301 | GIISPSGGSTS | 425 | CARWGDYGDLYYFD | 848 | RASQGISSALA | 973 | ATSTLQS | 1079 | CQQVNSYPP | 1291 |
| | | N | | YA | | YW | | | | | | TF | |
| 014S-H02 | Fzd6 | YIFTDYYM | 278 | GRINPNSGGT | 446 | CARARSSGWTDAFD | 648 | RASQSVSSWL | 1018 | AASTLQT | 1076 | CQQSYSTPTF | 1268 |
| | | H | | NYA | | IW | | A | | | | | |
| 014S-A03 | Fzd6 | GTFSSYAI | 207 | GWINAGNGN | 465 | CARHYYGSGSYPDW | 777 | RASQSISSYLN | 996 | AASSLQS | 1071 | CQQSYSTPLT | 1264 |
| | | S | | TTYA | | | | | | | | F | |
| 014S-B03 | Fzd6 | FTFSSYN | 145 | GRIKSKANGG | 444 | CARAGDSPDYW | 636 | RASQSISSYLN | 996 | AASSLQS | 1071 | CQQSYSTPLT | 1264 |
| | | MN | | TTDYA | | | | | | | | F | |
| 014S-E03 | Fzd8 | GTFSSYAI | 207 | KYAGWISPYNGYT | 481 | CARAMWSYGQQNA | 642 | RASQSISSYLN | 996 | AASSLQS | 1071 | CQQSYSTPLT | 1264 |
| | | S | | | | FDIW | | | | | | F | |
| 014S-G03 | Fzd8 | FTFTSSAV | 164 | GWMNPNSG | 490 | CARRTAVAGTIDYW | 811 | RASQSISSYLN | 996 | AASSLQS | 1071 | CQQSYSTPLT | 1264 |
| | | Q | | NTGYA | | | | | | | | F | |
| 014S-H03 | Fzd8 | YTFTSSAI | 296 | GRINPNSGGT | 446 | CARVKWELAIDYW | 837 | RASQSISSYLN | 996 | AASSLQS | 1071 | CQQSYSTPLT | 1264 |
| | | H | | NYA | | | | | | | | F | |
| 014S-B04 | Fzd8 | YIFTDYYM | 278 | GWMNPNSG | 490 | CARGGSRYDFWSGH | 734 | RASQGISNYLA | 971 | AASSLQS | 1071 | CQQSYSTPFT | 1260 |
| | | H | | NTGYA | | WYFDLW | | | | | | F | |
| 014S-E04 | Fzd8 | YTFTGYY | 288 | GRINPNSGGT | 446 | CARDVPKLVTRGVA | 701 | RASQSISSYLN | 996 | AASSLQS | 1071 | CQQSYSTPLT | 1264 |
| | | MH | | NYA | | YGMDVW | | | | | | F | |
| 014S-F04 | Fzd8 | YSFTTYG | 281 | GWINAGNGN | 465 | CARAAAGSYGGGY | 633 | RASQGISNNLN | 969 | EASSVAS | 1093 | CQQSYTSTPL | 1273 |
| | | MN | | TTYA | | W | | | | | | NSF | |
| 014S-G04 | Fzd8 | FTFSSYG | 144 | SAISGSGGST | 507 | CARDLTPFTQQQLVL | 677 | RASQSVSGYLA | 1010 | GASTRAA | 1110 | CQQYNYWPP | 1315 |
| | | MS | | YYA | | GLL | | | | | | AF | |
| 014S-H04 | Fzd8 | FTFTSSAV | 164 | GRIVPAIGFT | 449 | CARSGYNRRGYFDY | 816 | RASQSISSYLN | 996 | AASSLQS | 1071 | CQQSYSTPLT | 1264 |
| | | Q | | QYA | | W | | | | | | F | |
| 014S-A05 | Fzd8 | GTFSSYAI | 207 | GGIIPIFGTAN | 408 | CARVTLGASVDAFDI | 846 | RASQGISNNLN | 969 | DASSLES | 1085 | CLQHNSLPFT | 1172 |
| | | S | | YA | | W | | | | | | F | |
| 014S-B05 | Fzd8 | GTFSSYAI | 207 | GWVSPNTGN | 494 | CTTDRRYSTYFDLW | 918 | RASQSVSSNLA | 1014 | GVSNRAT | 1117 | CQQYNIWPR | 1310 |
| | | S | | TVYA | | | | | | | | TF | |
| 014S-C05 | Fzd8 | YTFASYG | 283 | GWINAGNGN | 465 | CARLSVWKWEQVT | 787 | RASQSISSYLN | 996 | AASSLQS | 1071 | CQQSYSTPLT | 1264 |
| | | MH | | TTYA | | NWFDPW | | | | | | F | |
| 014S-D05 | Fzd8 | GTFTSYAI | 216 | GWINAGNGN | 464 | CTTGLFPYYRYNWN | 919 | RASQSISSYLN | 996 | AASSLQS | 1071 | CQQSYSTPLT | 1264 |
| | | S | | TKYS | | NDAFDIW | | | | | | F | |
| 014S-F05 | Fzd9 | FTFTGSAV | 160 | GGILPIYGTTK | 418 | CARGARLYGCDYW | 718 | RASQZVSRZZA | 1025 | GASTRAT | 1111 | CQQRSNWPI | 1226 |
| | | Q | | YA | | | | | | | | TF | |
| 014S-G05 | Fzd9 | FTFSSSW | 140 | SAIGTGGGTY | 502 | CARKVKGYCSGGSCY | 781 | RVSQGISSALA | 1049 | AASSLQS | 1071 | CQQTFSVPW | 1276 |
| | | MH | | YA | | GYW | | | | | | TF | |
| 014S-H05 | Fzd9 | FTFSNYA | 130 | STISGSGVSTF | 555 | CARHGRIAADIW | 773 | RASQSISSYLN | 996 | AASSLQS | 1071 | CQQSYSTPLT | 1264 |
| | | MT | | YA | | | | | | | | F | |
| 014S-A06 | Fzd9 | FTFZZSZV | 167 | GGILPIYGTTK | 418 | CARGARLYGFDYW | 719 | RASQSVSRNLA | 1012 | GASTRAT | 1111 | CQQRSNWPI | 1226 |
| | | Q | | YA | | | | | | | | TF | |
| 014S-B06 | Fzd9 | FTFSSYSM | 146 | SYIENDGSITT | 562 | CARAPYYYGSGSLFR | 645 | RASQSISSYLN | 996 | AASSLQS | 1071 | CQQSYSTPLT | 1264 |
| | | N | | YA | | LDYW | | | | | | F | |
| 014S-C06 | Fzd10 | FTFTGSAV | 160 | GGILPIYGTTK | 418 | CARGARLYGFDYW | 719 | RASQSVSRNLA | 1012 | GASTRAT | 1111 | CQQRSNWPI | 1226 |
| | | Q | | YA | | | | | | | | TF | |
| 014S-D06 | Fzd10 | FTFSRYA | 133 | SGIGVGGGTY | 512 | CARDAYNWFDPR | 660 | RASQSISRYLN | 993 | AASSLQS | 1071 | CQQRYSTPLT | 1231 |
| | | MH | | YA | | | | | | | | F | |
| 014S-F06 | Fzd10 | YIFTDYYM | 278 | GVIFPVYPTP | 458 | CARGGSTGYYGMDV | 736 | RASQSVGRW | 1005 | AASSLQS | 1071 | CQQANTFPFT | 1213 |
| | | H | | DYA | | W | | MA | | | | F | |
| 014S-G06 | Fzd10 | FTFSSYA | 141 | SAIGAGGGTY | 500 | CARDAYNWFDPW | 661 | RASQSISSYLN | 996 | AASSLQS | 1071 | CQQSYSTPLT | 1264 |
| | | MH | | YA | | | | | | | | F | |
| 014S-H06 | Fzd10 | FTFSSYD | 142 | SAIGTGGGTY | 502 | CARDAYNWFDPW | 661 | RASQSISSYLN | 996 | AASSLQS | 1071 | CQQSYSTPLT | 1264 |
| | | MN | | YA | | | | | | | | F | |
| 014S-A07 | Fzd10 | FTFSNAQ | 124 | SAIGTGGGTY | 502 | CAREGSYYDWYFDL | 706 | RASQNIGSRLA | 978 | GASNRAS | 1102 | CQQYNHWPP | 1309 |
| | | MS | | YA | | W | | | | | | LFTF | |
| 017S-E08 | Fzd8 | IIFSPNDM | 223 | ALISSGGSTSY | 359 | CHFGVASVGLNYW | 877 | | | | | | |
| | | G | | A | | | | | | | | | |
| 017S-H08 | Fzd8 | RTFSSFV | 256 | AAVSASGGYT | 341 | CNLAQRGETYW | 895 | | | | | | |
| | | MG | | WYA | | | | | | | | | |
| 017S-A09 | Fzd8 | LAFNGYT | 227 | AAISWSDNTY | 323 | CAAGFPTVFVVDGE | 577 | | | | | | |
| | | MG | | YA | | YDYW | | | | | | | |
| 017S-B09 | Fzd8 | FTLDYYAI | 168 | ADITSGGSTN | 346 | CNAVTYNGYTIW | 891 | | | | | | |
| | | S | | YA | | | | | | | | | |
| 017S-C09 | Fzd8 | LTFSDYTV | 229 | ASSTGGGVFE | 373 | CNAVTYNGYTIW | 891 | | | | | | |
| | | G | | NYA | | | | | | | | | |
| 018S-D06 | Fzd4 | RIFSSYAQ | 240 | PRIPSDSTTFY | 497 | CEVHNFGATYW | 876 | | | | | | |
| | | A | | A | | | | | | | | | |
| 018S-E06 | Fzd4 | RTFSNYV | 254 | AVISRSGGNT | 381 | CNAVSTDWTTDYW | 889 | | | | | | |
| | | MG | | YYT | | | | | | | | | |
| 018S-F06 | Fzd4 | RTFSTYG | 259 | AAISWSDNTY | 323 | CNSFPLRLHDW | 899 | | | | | | |
| | | MG | | YA | | | | | | | | | |
| 018S-G06 | Fzd5 | LAIDDYY | 228 | SYISTSDGSTY | 571 | CNAVTYNGYSIW | 890 | | | | | | |
| | | MV | | YA | | | | | | | | | |
| 018S-H06 | Fzd5 | LAFNGYT | 227 | AQISWTGGS | 369 | CNADYGTWYGIGW | 882 | | | | | | |
| | | MG | | TDYA | | | | | | | | | |
| 018S-A07 | Fzd5 | LAFNGYT | 227 | AAISWMSNT | 321 | CNMGLGYSEYRPLG | 896 | | | | | | |
| | | MG | | YYA | | YW | | | | | | | |
| 018S-B07 | Fzd5 | SAFSNYA | 265 | AAITWSGART | 335 | CNAVWKFGTTHW | 892 | | | | | | |
| | | MG | | YYA | | | | | | | | | |
| 018S-C07 | Fzd7 | LTIDDYYV | 233 | SYISAGDGFT | 564 | CNAVTYNGYTIW | 891 | | | | | | |
| | | V | | YYA | | | | | | | | | |
| 017S-F09 | Fzd4 | GSFSGYY | 189 | GEINHSGSTN | 398 | CARDLRFYSSSWRRV | 675 | RSSRSLLHTS | 1045 | LGSNRAS | 1131 | CMQGTRWP | 1183 |
| | | WS | | YN | | GMDVW | | GYNYLD | | | | TF | |
| 017S-G09 | Fzd4 | YTITTYAIH | 305 | GWINADTGD | 462 | CARGWTTISSLGVW | 769 | RSSRSLLHTNG | 1044 | LGSNRAS | 1131 | CMQALQTPL | 1175 |
| | | | | TAYS | | YNYLD | | | | | | TF | |
| 017S-H09 | Fzd5 | NIFRIYAIA | 236 | AALTGQRTTN | 336 | CNTVTYNAGCYKKY | 901 | | | | | | |
| | | | | YA | | W | | | | | | | |
| 017S-A10 | Fzd5 | LAFNGYT | 227 | ASITWNGRYT | 371 | CNARLDAVYGHSRY | 885 | | | | | | |
| | | MG | | YYA | | DSW | | | | | | | |
| 017S-B10 | Fzd5 | NFFSNYPL | 235 | GAISRTGSGT | 393 | CAAGVTGSWRYW | 581 | | | | | | |
| | | G | | FYA | | | | | | | | | |
| 017S-C10 | Fzd8 | RSFSNYRV | 245 | AVSWSVGMT | 388 | CNAVTYNGYTIW | 891 | | | | | | |
| | | A | | YYA | | | | | | | | | |
| 017S-D10 | Fzd8 | GTFGSYA | 200 | GLISRNAGNT | 427 | CNAVNGRLNYW | 888 | | | | | | |
| | | VG | | LYA | | | | | | | | | |
| 017S-E10 | Fzd8 | RTFSSYSL | 258 | AAVSASGAN | 340 | CAAPQSPNMYIRTD | 584 | | | | | | |
| | | A | | TYYA | | QLWWYKYW | | | | | | | |
| 018S-D07 | Fzd1 | RSFSTYP | 246 | TVISGSGGST | 573 | CAAGPTLPFRYW | 580 | | | | | | |
| | | MG | | YYA | | | | | | | | | |
| 018S-E07 | Fzd1 | RAFSNYA | 238 | AAINWSGDS | 315 | CNARLSFAGGMGY | 886 | | | | | | |
| | | MG | | AYYA | | W | | | | | | | |
| 018S-F07 | Fzd1 | IKSMFDM | 224 | AFITRGGTTR | 347 | CNAVSTDWTRDYW | 889 | | | | | | |
| | | NFMG | | YG | | | | | | | | | |
| 018S-G07 | Fzd1 | LTIDDYY | 232 | SYIGTSDGTTY | 563 | CNAVTYNGYTIW | 891 | | | | | | |
| | | MV | | YA | | | | | | | | | |
| 018S-H07 | Fzd4 | RVFSSYA | 264 | AGIASDSTTFY | 348 | CKVHNFGATYW | 880 | | | | | | |
| | | QA | | A | | | | | | | | | |
| 018S-A08 | Fzd4 | RIFSSYAQ | 240 | ASIPSDGTTFY | 370 | CKVHNFEATYW | 879 | | | | | | |
| | | A | | A | | | | | | | | | |
| 018S-B08 | Fzd4 | LTFSTYG | 231 | AAINWSGRS | 316 | CNSFPLRLHDW | 899 | | | | | | |
| | | MG | | TVYA | | | | | | | | | |
| 018S-C08 | Fzd4 | RTLSSYVV | 261 | ALISLSGASTY | 358 | CNAVSTDWTTDYW | 889 | | | | | | |
| | | G | | YA | | | | | | | | | |
| 018S-D08 | Fzd5 | IKSMFDM | 224 | AFITRGGTTR | 347 | CNAVSTDWTRDYW | 889 | | | | | | |
| | | NFMG | | YG | | | | | | | | | |
| 018S-E08 | Fzd5 | RTDGMQ | 248 | GAITWSLGSA | 395 | CNVLAQNDGDYRTY | 904 | | | | | | |
| | | AMG | | FYA | | G | | | | | | | |
| 018S-F08 | Fzd5 | RTFSSFV | 256 | AAVSASGGYT | 341 | CNAVWKFGTTHW | 892 | | | | | | |
| | | MG | | WYA | | | | | | | | | |
| 018S-G08 | Fzd5 | RTFSSFV | 256 | AAVSASGGYT | 341 | CNAVCKFGTTHW | 887 | | | | | | |
| | | MG | | WYA | | | | | | | | | |
| 018S-H08 | Fzd5 | RTFSSFV | 256 | AAVTASGGY | 343 | CNAVWKFGTTHW | 892 | | | | | | |
| | | MG | | AWYA | | | | | | | | | |
| 018S-A09 | Fzd8 | ITFSFNSV | 226 | AVFIAGYGAY | 379 | CNGVTYNGYTIW | 894 | | | | | | |
| | | G | | YA | | | | | | | | | |
| 018S-B09 | Fzd8 | HDFSSTYG | 221 | ATISWGGTNI | 377 | CAAQKPYYNGHFYA | 585 | | | | | | |
| | | VG | | A | | DDKHYDHW | | | | | | | |
| 018S-C09 | Fzd8 | ITFGFDSV | 225 | AVFNAGYRA | 380 | CNAVTYNGYTIW | 891 | | | | | | |
| | | G | | YYA | | | | | | | | | |
| 018S-D09 | Fzd8 | RTFSWYS | 260 | AAVSWSGVS | 342 | CNAVTYNGYTIW | 891 | | | | | | |
| | | MG | | TYYP | | | | | | | | | |
| 018S-E09 | Fzd8 | ITFSFNSV | 226 | AVFIAGYGAY | 379 | CIGVTYNGYTIG | 878 | | | | | | |
| | | G | | YA | | | | | | | | | |
| 018S-F09 | Fzd8 | RTDGMQ | 248 | GAITWSLGIA | 394 | CNVLAQNDGDYRTY | 905 | | | | | | |
| | | AMG | | FYA | | W | | | | | | | |
| 018S-G09 | Fzd8 | HDFSSTYG | 221 | AAISWRGTNI | 322 | CAAQKPYYNGHFYA | 585 | | | | | | |
| | | VG | | A | | DDKHYDHW | | | | | | | |
| 021S-A01 | Fzd8 | DSVSSNS | 74 | GRAYYKSRW | 433 | CVRDLRPSGDLNFDY | 926 | RASQSIGSSLH | 985 | YASQSVS | 1154 | CHQSGRVPV | 1162 |
| | | AAWN | | YYDYA | | W | | | | | | TF | |
| 021S-C01 | Fzd1 | GSISSGGY | 195 | GSIYHSGSTYY | 454 | CARFYYDILNGYSYF | 714 | RSSRSLLDTDD | 1040 | TLSHRAS | 1153 | CMQSIQLPW | 1188 |
| | | SWS | | N | | DYW | | GNTYLD | | | | TF | |
| 021S-D01 | Fzd1 | FTFSSYG | 143 | AVISYDGSNK | 384 | CAKGSVFGLKAGGY | 618 | RSSQSLVHSDG | 1038 | KISNRFS | 1124 | CMQATQFPH | 1177 |
| | | MH | | YYA | | ADYW | | NTYLS | | | | TF | |
| 021S-E02 | Fzd8 | YTFTSYGIS | 300 | GWISAYNGN | 477 | CARDGTPFYSGSYYG | 669 | QGDSLRTYYAS | 949 | GKNNRPS | 1113 | CNSRDNSGK | 1193 |
| | | | | TNYA | | SW | | | | | | HKVF | |
| 021S-G02 | Fzd8 | DSVSSNS | 76 | GRTYYRSKYY | 452 | PRLDYW | 930 | RSSQSLLDSDD | 1031 | MLSSRAP | 1134 | CMQRLEFPYT | 1187 |
| | | GAWN | | NGYA | | | | GNTYLD | | | | F | |
| 021S-A03 | Fzd8 | DSVSSNS | 74 | GRTYYRSKW | 451 | CARSQATGERFDYW | 818 | RSSQNIFQSLN | 1029 | SASSLQS | 1148 | CQQSYNSPIT | 1240 |
| | | AAWN | | YNDYA | | | | | | | | F | |
| 022S-H06 | Fzd4 | FTFSSYA | 141 | SVISTSGGTVL | 560 | CADGSGTSHR | 587 | RASQSISSYLN | 996 | AASSLQS | 1071 | CQQSYSTPLT | 1264 |
| | | MS | | YT | | | | | | | | F | |
| 022S-A11 | Fzd10 | YIFTDYYM | 278 | GGIFPIFGTAN | 402 | CAKGSYYYDNSGYY | 619 | RASQGISNNIN | 968 | AASNLET | 1062 | CQQTYSIPFTF | 1283 |
| | | H | | YA | | WDAFDIW | | | | | | | |
| 027S-H02 | Fzd5 | FTFSSYA | 141 | SAISGSGGST | 507 | CAKGLWGPLLNW | 615 | RASQSVSSNYL | 1016 | GASSRAP | 1106 | CQQRTNWPP | 1228 |
| | | MS | | YYA | | | | S | | | | RVTF | |
| 027S-B03 | Fzd8 | DSVSSNS | 75 | GRTYYRSKW | 451 | CTRGNWNVGLANW | 911 | SGTSSNIGAGY | 1053 | GNNNRPS | 1113 | CSAWDDNLN | 1324 |
| | | ATWN | | YSDYA | | | | DVH | | | | GVVF | |
| 027S-E01 | Fzd5 | RSFSIYNT | 244 | AAISWSGGST | 327 | CNVITIVRGMGPRAY | 903 | | | | | | |
| | | A | | YYA | | W | | | | | | | |
| 004S-D05 | Fzd5 | LTFSIYAM | 230 | SAISGDGALT | 504 | CARGVYPYSSKHKPS | 767 | QASQDISNYLN | 943 | AASSLQS | 1071 | CQQSYSTPLF | 1263 |
| | | H | | YYA | | YYYYGMDVW | | | | | | TF | |
| 004S-D04 | Fzd5 | YDFTTYGI | 277 | GGVIPAFGAT | 420 | CARGYYYGMDVW | 771 | RASQSISSYLN | 996 | AASSLQS | 1071 | CQQSYSTPLT | 1264 |
| | | H | | DYS | | | | | | | | F | |
| 004S-B05 | Fzd5 | GTFSSYAI | 207 | GWINAGNGN | 465 | CASGLGYFDYW | 854 | RASQSISSYLN | 996 | AASSLQS | 1071 | CQQSYSTPLT | 1264 |
| | | S | | TTYA | | | | | | | | F | |
| 004S-G03 | Fzd5 | YTFTNNF | 292 | GGIIPIFGTPH | 411 | CARTLTTPPYYYGM | 826 | RASQSISSYLN | 996 | AASSLQS | 1071 | CQQSYSTPLT | 1264 |
| | | MH | | YA | | DVW | | | | | | F | |
| 004S-F03 | Fzd5 | FTFSNSD | 128 | SAIGTGGDTY | 501 | CTRDLYGGYRDYW | 910 | KSSCLSLLHSD | 933 | LGSNRAS | 1131 | CMQGLQTP | 1180 |
| | | MN | | YA | | | | GYTYLY | | | | WTF | |
| 004S-C04 | Fzd5 | YIFTGYYM | 279 | GRINPNSGGT | 446 | CARGGEYSSGWTYY | 724 | RATQTISTYLN | 1027 | AASRLQS | 1067 | CQQYYSYPW | 1319 |
| | | H | | NYA | | YYYGMDVW | | | | | | TS | |
| 004S-B06 | Fzd5 | YTFTYRYL | 303 | GMINPIGGSI | 431 | CARDVMDVW | 700 | RASQGISNNLN | 969 | AASALQS | 1061 | CQHLNNFPLT | 1196 |
| | | H | | NYA | | | | | | | | F | |
| 004S-F06 | Fzd5 | FSVGSNY | 100 | SSISSGNSYIY | 541 | CARGPKTMWEDRP | 748 | RASQSISSYLN | 996 | AASSLQS | 1071 | CQQSYSTPLT | 1264 |
| | | MT | | YA | | DYW | | | | | | F | |
| 004S-A04 | Fzd5 | FTFSTYSM | 158 | GFIRSKDYGG | 400 | CARLTGGAVAGTHR | 789 | RASQGISNNLN | 969 | GASSLQS | 1105 | CQQSHSSPRT | 1237 |
| | | I | | TTEYA | | DYW | | | | | | F | |
| 004S-A05 | Fzd5 | FTFSSYVM | 150 | SAIGTGGGTY | 502 | CARGSSGYYVAW | 759 | RASQSISSYLN | 996 | AASSLQS | 1071 | CQQSYSTPLT | 1264 |
| | | S | | YA | | | | | | | | F | |
| 004S-F05 | Fzd5 | FTFSNHY | 126 | AGVSIDANKK | 356 | CARDQNDSWYRSD | 682 | RSSQSLLHSDG | 1033 | LGSHRAS | 1129 | CMQGLQTPH | 1179 |
| | | MS | | YYA | | YW | | YTYLY | | | | TF | |
| 003S-C01 | Fzd1 | GTFSSYAI | 207 | GRINPNSGGT | 446 | CARGSGYDFFDYGM | 758 | RASQSISNNLN | 990 | AASSLQS | 1071 | CQQSYNTPFT | 1241 |
| | | S | | NYA | | DVW | | | | | | F | |
| 003S-H01 | Fzd1 | DTFSNYVL | 78 | GLVDPEDGET | 429 | CAKASTPMVQGAPD | 594 | RASQSIGSNLD | 983 | AASTLQS | 1075 | CQQNYATPR | 1224 |
| | | S | | IYA | | YW | | | | | | TF | |
| 003S-H02 | Fzd1 | GTFNRYAI | 201 | GGIIPIFGTAN | 408 | CATTQGVYSSSWYG | 873 | RASQSISSYLN | 996 | AASSLQS | 1071 | CQQSYSTPLT | 1264 |
| | | T | | YA | | GGRAFDIW | | | | | | F | |
| 003S-H04 | Fzd1 | YTFTYRYL | 303 | GRINPNSGGT | 446 | CWGGSYYGDYW | 927 | RASQGISNNLN | 969 | AASSLQS | 1071 | CQQANSFPIT | 1208 |
| | | H | | NYA | | | | | | | | F | |
| 003S-A05 | Fzd2 | FTFSSYA | 141 | SSISWNSGRV | 545 | CARGSGIAASGSYW | 757 | TSSQSLLHSDG | 1058 | LGSNRAS | 1131 | CMQGTHWP | 1182 |
| | | MH | | DYA | | | | KTYLY | | | | YTF | |
| 003S-B05 | Fzd2 | FTFSNAW | 125 | STIAGSGGRT | 550 | CAKDSIGRRGRGAP | 606 | KSSQSLLHSDG | 932 | LGSNRAS | 1131 | CMQSLQSPLT | 1189 |
| | | MS | | YYS | | QPYYYYGMDVW | | KTYLY | | | | F | |
| 003S-F05 | Fzd2 | FSFSTYTM | 98 | SRINGDGSST | 531 | CARAIVGATGLNRFK | 640 | KSSQSLLHSDG | 932 | LGSNRAS | 1131 | CMQNTHWP | 1186 |
| | | S | | RYA | | AFDIW | | KTYLY | | | | LTR | |
| 003S-G05 | Fzd2 | STFTNAW | 273 | SAIGTGGGTY | 502 | CARDRVTLRGGYSY | 693 | RSSRSLLHSNG | 1043 | LASRRAS | 1125 | CIQNTHWPLT | 1164 |
| | | MS | | YA | | GTDAFDIW | | NTYLR | | | | R | |
| 003S-H05 | Fzd2 | FTLSTYN | 170 | SRINYDGSAT | 533 | CARDRDIVVVPAQR | 683 | KSSQSLLHSDG | 932 | MGSYRAS | 1133 | CMQGTHWP | 1181 |
| | | MN | | TYA | | GEGGFDPW | | KTYLY | | | | LTF | |
| 003S-A07 | Fzd2 | FTFSSYA | 141 | SAISGSGGST | 507 | CAKGGRDGYKGYFD | 611 | KSSQSLLHSDG | 932 | LGSNRAS | 1131 | CMQNTHWP | 1185 |
| | | MS | | YYA | | YW | | KTYLY | | | | LTL | |
| 003S-C07 | Fzd2 | FSFRSYSM | 92 | SAIGTGGGTY | 502 | CTTTTVTTSW | 923 | RTSQSVSSNLA | 1048 | DASNRAS | 1083 | CQQYGSSPY | 1304 |
| | | S | | YA | | | | | | | | NF | |
| 003S-F07 | Fzd2 | FSFSSYG | 97 | SHISSGGATID | 526 | CARDGGYW | 665 | RASQSISSYLN | 996 | AASSLQS | 1071 | CQQSYSTPLT | 1264 |
| | | MS | | YA | | | | | | | | F | |
| 003S-G07 | Fzd2 | FTFSSYW | 152 | SYISGDSGYT | 566 | CARDNGYCSGGSCY | 680 | RASQAISSYLA | 957 | KASTLDT | 1122 | CQQADTFPFT | 1206 |
| | | MH | | NYA | | ATYYGMDVR | | | | | | F | |
| 003S-B08 | Fzd2 | FTFSSZZM | 153 | AVISYDGSNR | 385 | CARSYYDSSGYPRKD | 824 | KSSQSLLHSDG | 932 | LGSNRAS | 1131 | CMQTLKAPLT | 1192 |
| | | H | | ZYA | | AFDIW | | KTYLY | | | | F | |
| 003S-F08 | Fzd2 | ZSVSSNY | 310 | SRINSDGSTIS | 532 | CARARLLGGYYTPDR | 647 | RSSQYLSSAYL | 1039 | GASSRAT | 1107 | CQQYGSSPTF | 1303 |
| | | MS | | YA | | MDVW | | A | | | | | |
| 003S-H08 | Fzd2 | FTFNRHAL | 111 | ALISSNGDHK | 360 | CARDLMVGRNKLDY | 674 | QASQGISNNL | 946 | AASSLQS | 1071 | CQQSYSTPAF | 1259 |
| | | S | | YYT | | W | | N | | | | TF | |
| 003S-A09 | Fzd2 | FTFSSSN | 139 | SGISGSGSSTY | 518 | CARGRVWSSRDYW | 756 | RSSQSLLHSDG | 1033 | LGSNRAS | 1131 | CMQGTHWP | 1181 |
| | | MN | | YA | | | | YTYLY | | | | LTF | |
| 003S-B09 | Fzd2 | FNIRRZN | 88 | SAIGTGGGTY | 502 | CARGDSGSYRDYW | 720 | RSSESLLHSDG | 1028 | LGSNRAS | 1131 | CTQTVQFPIT | 1325 |
| | | MZ | | YA | | | | KTYLY | | | | F | |
| 003S-C09 | Fzd2 | FTFSSSAM | 138 | SGISGSGTTTY | 519 | CARRLIAVAGAEFDP | 809 | RASQGISNNLN | 969 | SASNLQS | 1146 | CQQSYSTPW | 1270 |
| | | H | | YR | | W | | | | | | TF | |
| 003S-F09 | Fzd4 | FTFSNSD | 128 | GRIKSKAYGG | 445 | CARQYYFDYW | 806 | RASQSISSYLN | 996 | AASSLQS | 1071 | CQQSYSTPLT | 1264 |
| | | MN | | TTEYA | | | | | | | | F | |
| 003S-H09 | Fzd4 | FTFSSFGM | 135 | SVISSGGSPYY | 558 | CATASGDFDYW | 865 | RASQSIGSNLN | 984 | RASTLES | 1142 | CQQTYTTPRF | 1290 |
| | | H | | A | | | | | | | | | |
| 003S-A10 | Fzd4 | FTFDDYA | 105 | AIVSYDGTYK | 357 | CARQTRGGTTDGW | 804 | RASQGISNNLN | 969 | YASSLQS | 1156 | CQQSHSPPGT | 1236 |
| | | MH | | YYS | | | | | | | | F | |
| 003S-B10 | Fzd4 | FTFSSHST | 136 | SAISASGDSTF | 503 | CARPIVGATAFDIW | 797 | RASQSISSYLN | 996 | AASSLQS | 1071 | CQQSYSTPLT | 1264 |
| | | H | | YA | | | | | | | | F | |
| 003S-G10 | Fzd4 | FTZSSYSM | 177 | SYSSGNSGYT | 572 | CARGVVGSGAFDIW | 765 | RASQSIVSYLN | 1002 | DASNLQS | 1082 | CQQGYSAPW | 1220 |
| | | N | | NYA | | | | | | | | TF | |
| 003S-B11 | Fzd4 | FTFSDYY | 122 | SAIDGAGRTY | 498 | CARAIPGDYDYW | 639 | RASQSISSYLN | 996 | AASSLQS | 1071 | CQQSYSTPLT | 1264 |
| | | MS | | YT | | | | | | | | F | |
| 003S-C11 | Fzd4 | FTFTSYA | 165 | GGIIPIFGIAN | 405 | CARTGRGYYGMDV | 825 | RASQSIGSNLD | 983 | AASTLQS | 1075 | CQQSYSTPRT | 1265 |
| | | MH | | YA | | W | | | | | | F | |
| 003S-D11 | Fzd4 | FTFSSYSM | 147 | SYISGDSGYT | 566 | CARAGVATIAFDYW | 638 | RASQSISSYLN | 996 | AASSLQS | 1071 | CQQSYSTPLT | 1264 |
| | | S | | NYA | | | | | | | | F | |
| 003S-F11 | Fzd4 | FTFDDYG | 106 | SAISGSGGST | 507 | CTTPNYYDSR | 920 | RASQSISSYLN | 996 | AASSLQS | 1071 | CQQSYSTPLT | 1264 |
| | | MH | | YYA | | | | | | | | F | |
| 003S-E12 | Fzd4 | GTFSSYAI | 207 | GWINAGNGN | 465 | CARHYYGSGSYPDW | 777 | 2PZQT2ZSHLN | 1060 | PASSLQS | 1136 | CQQSYSTPLT | 1264 |
| | | S | | TTYA | | | | | | | | F | |
| 004S-A01 | Fzd4 | FTFSTYG | 157 | SYISSSSSAIYY | 569 | CARGGLDGPIDYR | 727 | RASQGISNNLN | 969 | AASTLQS | 1075 | CQQGNNFPF | 1218 |
| | | MH | | A | | | | | | | | TF | |
| 004S-G01 | Fzd4 | FTVSSHS | 173 | SLVSFDGSKE | 528 | CARLGSTPDYW | 784 | RASQGISNNLN | 969 | AASSLQS | 1071 | CQQYYTYPYT | 1320 |
| | | MG | | HYA | | | | | | | | F | |
| 004S-C02 | Fzd4 | FTFSSYG | 143 | AVISYDGSNK | 384 | CASDPVTAATR | 853 | RASQSISSYLN | 996 | AASSLQS | 1071 | CQQSYSTPLT | 1264 |
| | | MH | | YYA | | | | | | | | F | |
| 004S-D02 | Fzd4 | FSFSSYG | 97 | SGISGSGRSTY | 517 | CAKDGYW | 596 | RASQSISSYLN | 996 | AASSLQS | 1071 | CQQSYSTPLT | 1264 |
| | | MS | | YA | | | | | | | | F | |
| 004S-A03 | Fzd4 | FTFSSYA | 141 | SGINWNGGS | 513 | CARPAGSAQNWFD | 796 | RASQGISNNLN | 969 | DASNLET | 1081 | CHQSYSIPRTF | 1163 |
| | | MH | | TGYA | | PW | | | | | | | |
| 004S-803 | Fzd4 | FSFSRYG | 94 | SGVGGSGGS | 524 | CARDGSW | 668 | RASQDVDTWL | 963 | DASTLET | 1087 | CQQGYNIPW | 1219 |
| | | MS | | TZYA | | | | A | | | | TF | |
| 004S-C03 | Fzd4 | YTFTSYAIS | 297 | GIINPSGGSTS | 422 | CARQIGWELMPDIW | 803 | QASQDISSYLN | 944 | AASTLQS | 1075 | CQQAISFPLTF | 1207 |
| | | | | YA | | | | | | | | | |
| 004S-C05 | Fzd5 | ZZZTDYYZ | 312 | GGMNZNRG | 419 | CANGSYAQHLW | 629 | RASQSISSYLN | 996 | AASSLQS | 1071 | CQQSYSTPLT | 1264 |
| | | Q | | NTGYA | | | | | | | | F | |
| 004S-G05 | Fzd5 | FTFSSYW | 152 | STISPSGLYIY | 556 | CAKDKVPYSYGPNF | 600 | RASQSISSYLN | 996 | AASSLQS | 1071 | CQQSYSTPLT | 1264 |
| | | MH | | QA | | DYW | | | | | | F | |
| 004S-E06 | Fzd5 | FFFSGYW | 83 | ANIKQDGSEK | 368 | CARVFPLHDYW | 831 | QASQDISNYLN | 943 | KASSLES | 1120 | CQQANSFPYT | 1211 |
| | | MS | | YYV | | | | | | | | F | |
| 004S-C06 | Fzd5 | FPFSTFSM | 90 | AGISWNSGTI | 355 | CARSGPAAMVYYYY | 815 | RSSQNVSSYLA | 1030 | GASTRAT | 1111 | CQHRANWP | 1198 |
| | | N | | DYA | | GMDVW | | | | | | QTF | |
| 004S-E07 | Fzd6 | FTLSSHH | 169 | SAIGTGGGTY | 502 | CAAPDYW | 583 | RASQSISSYLN | 996 | AASSLQS | 1071 | CQQSYSTPLT | 1264 |
| | | MN | | YA | | | | | | | | F | |
| 004S-F07 | Fzd6 | FSFSKKYM | 93 | SSIDGNGDHV | 536 | CARPYYYDSSGYDP | 801 | QASQDITNYLN | 945 | KASTLES | 1123 | CQQSYSAPYT | 1248 |
| | | T | | FYA | | MGDYW | | | | | | F | |
| 004S-C08 | Fzd6 | FTVSSNY | 174 | SAIGTGGGTY | 502 | CAQGTYW | 632 | RASQSISSYLN | 996 | AASSLQS | 1071 | CQQSYSTPLT | 1264 |
| | | MN | | YA | | | | | | | | F | |
| 004S-F08 | Fzd6 | FTFDDYY | 107 | SAVSGNGGG | 511 | CARGGNYGSGDYW | 730 | RASQSISZWLA | 1000 | EASTLQS | 1094 | CQQTYTPPFT | 1289 |
| | | MN | | TFYA | | | | | | | | F | |
| 004S-G09 | Fzd6 | GTLNNHT | 219 | GRIIPIFGTAN | 435 | CARDRRGYGMDVW | 692 | RASQAISNSLA | 955 | DASNLET | 1081 | CQQAYSFPW | 1216 |
| | | LS | | YA | | | | | | | | TF | |
| 004S-B10 | Fzd6 | FTFSDYY | 122 | SGINWNSAKI | 514 | CARIGAGGAFDIW | 778 | RASQSISSYLN | 996 | AASSLQS | 1071 | CQQSYSTPLT | 1264 |
| | | MS | | GYV | | | | | | | | F | |
| 004S-H10 | Fzd6 | FIFSDYYM | 84 | AVITSGGTFK | 386 | CARNGIAAAEDYW | 793 | RASQSISTYLS | 999 | GASSLES | 1104 | CQQSYSPPFT | 1254 |
| | | S | | YYA | | | | | | | | F | |
| 004S-B11 | Fzd6 | FTFSSSW | 140 | SGISWNSGSI | 522 | CARYSSGGSLDYW | 852 | RASQSISSYLN | 996 | AASSLQS | 1071 | CQQSYSTPLT | 1264 |
| | | MH | | GYA | | | | | | | | F | |
| 004S-D11 | Fzd6 | YZFZZZYM | 309 | GRINPNSGGT | 446 | CARARSSGWTDAFD | 648 | RASQSVSSWL | 1018 | AASTLQT | 1076 | CQQSYSTPTF | 1268 |
| | | H | | NYA | | IW | | A | | | | | |
| 004S-F11 | Fzd6 | FTFSSYA | 141 | SSISGGGRHT | 539 | CARPYSSSRQGDYW | 800 | RASQSISSYLN | 996 | AASSLQS | 1071 | CQQSYSTPLT | 1264 |
| | | MS | | YYA | | | | | | | | F | |
| 004S-Gil | Fzd6 | YIFTDYYM | 278 | GWINPNSGG | 471 | CARDRPGFDPW | 687 | RASQSVSSYLA | 1019 | GASSRAT | 1107 | CQQYAISYTF | 1292 |
| | | H | | TNYA | | | | | | | | | |
| 004S-812 | Fzd6 | FTFSSYWI | 151 | SYISGDSGYT | 566 | CAKGIRWFDPW | 613 | RASQSISSYLN | 996 | AASSLQS | 1071 | CQQSYSTPLT | 1264 |
| | | H | | NYA | | | | | | | | F | |
| 004S-C12 | Fzd6 | YIFTDYYM | 278 | GWMNPNSG | 490 | CASSHYAPGMDVW | 859 | RASQGISSYLA | 974 | RTSTLES | 1144 | CQQSYSTPW | 1270 |
| | | H | | NTGYA | | | | | | | | TF | |
| 004S-F12 | Fzd7 | FTVGNNY | 171 | SSITTTSTLY | 547 | CARGKEGRYSNYE | 741 | RASQSISSYLN | 996 | AASTLQT | 1076 | CQQSYSIPFTF | 1250 |
| | | MS | | A | | AAW | | | | | | | |
| 005S-B01 | Fzd7 | FTFRSYG | 116 | SLISGSGDNT | 527 | CARREPLYSSRRG | 807 | RASQSISSYLN | 996 | AASSLQS | 1071 | CQQSYSTPLT | 1264 |
| | | MH | | NYA | | AFDIW | | | | | | F | |
| 005S-C01 | Fzd7 | FTFSSYSM | 147 | SAISGSGGST | 507 | CTRTIVGATPHYW | 914 | RASQGISNNLN | 969 | KASSLQS | 1121 | CQQSYSLPYT | 1252 |
| | | S | | YYA | | | | | | | | F | |
| 005S-F01 | Fzd7 | FTVSSNY | 175 | SAISGSGATTT | 505 | CAKGAGYGSGSWQ | 608 | RASQSVSSSYL | 1017 | GASSRAT | 1107 | CQQRYKSYTF | 1229 |
| | | MS | | YA | | AAW | | S | | | | | |
| 005S-B02 | Fzd8 | YSFTNYA | 280 | GRIIPIFGTAZ | 436 | CARGTFLEWLLTN | 763 | RASQSISSYLN | 996 | AASSLQS | 1071 | CQQSYSTPLT | 1264 |
| | | MH | | YA | | YGMDVW | | | | | | F | |
| 005S-D02 | Fzd8 | GTFSSYVI | 209 | GWIGPHNGN | 461 | CATGWPRYYYGMD | 868 | RASQSVSSNLA | 1014 | NTSNRAT | 1135 | CQHYNNWPF | 1201 |
| | | S | | TNYA | | VW | | | | | | TF | |
| 005S-G02 | Fzd8 | YTFTSYYM | 301 | GGIIPIFGTAZ | 409 | CARLPYYDFWSGYY | 786 | RASQSVSTNLA | 1020 | DASNRAT | 1084 | CQQRSNWPP | 1227 |
| | | H | | YA | | GGRTGFDYW | | | | | | QITF | |
| 005S-H02 | Fzd8 | YTFTYRYL | 303 | GWINAGNGN | 465 | CARASLYYDYVWGS | 650 | QASQDISHYLN | 941 | AASSLQS | 1071 | CQQSYSTPLT | 1264 |
| | | H | | TTYA | | YRHYYFDYW | | | | | | F | |
| 005S-B03 | Fzd8 | GTFSSYAI | 207 | GIINPSGGRTT | 421 | CATSFGGGWIVVDT | 872 | RASQSINSNLA | 989 | GASSRAT | 1107 | CQQYGSSPYT | 1305 |
| | | S | | YA | | SLWYW | | | | | | F | |
| 005S-C03 | Fzd8 | GSFSGYAI | 187 | GGIIPIFGTAN | 408 | CRVDAFDIW | 906 | RASQSVSSSYL | 1017 | DTSNRAT | 1090 | CQQYGSSPIT | 1300 |
| | | S | | YA | | | | S | | | | F | |
| 005S-E03 | Fzd8 | FTFTSSAV | 164 | GGIIPIFGTAN | 408 | CARSSGWQNRFAFD | 820 | RTSQSISSYLN | 1047 | AASTSQS | 1077 | CQQSFSSWTF | 1234 |
| | | Q | | YA | | IW | | | | | | | |
| 005S-F03 | Fzd8 | YTFTYRYL | 303 | GWINAGNGN | 464 | CATDLPVRKGFTY | 867 | RASQSISSYLN | 996 | AASSLQS | 1071 | CQQSYSTPLT | 1264 |
| | | H | | TKYS | | YDILTGSYGMDVW | | | | | | F | |
| 005S-B04 | Fzd8 | YTFTNNF | 292 | GGIIPIFGTAN | 407 | CARGLRYFDWPQGI | 745 | QASHDINIALN | 936 | AASSLQS | 1071 | CQQSYSSPLT | 1257 |
| | | MH | | HA | | YYYYGMDVW | | | | | | F | |
| 005S-C04 | Fzd8 | YTFTSYYM | 301 | GRINPNSGGT | 446 | CARGGLLFDYW | 728 | RASQSISSYLN | 996 | AASSLQS | 1071 | CQQSYSTPLT | 1264 |
| | | H | | NYA | | | | | | | | F | |
| 005S-D04 | Fzd8 | FTFSTYSM | 159 | STIGTGGGTY | 552 | CARVGWLRFLDYW | 835 | RASQSISSYLN | 996 | AASSLQS | 1071 | CQQSYSTPLT | 1264 |
| | | S | | YA | | | | | | | | F | |
| 005S-G04 | Fzd8 | GTFSSYAI | 207 | GWMSPSSGN | 492 | CARNNFLRAFDIW | 794 | RASQSISSYLN | 996 | AASSLQS | 1071 | CQQSYSTPLT | 1264 |
| | | S | | AGYA | | | | | | | | F | |
| 005S-A05 | Fzd8 | FAFSSYA | 81 | SRIDTDGSTT | 529 | CARAPSYSSGVVYVR | 644 | RASQSISSYLN | 996 | AASSLQS | 1071 | CQQSYSTPLT | 1264 |
| | | MS | | VYA | | W | | | | | | F | |
| 005S-C05 | Fzd8 | YTFTYYA | 304 | GIINPSGGSTS | 422 | CARELLPMTTVTSP | 709 | RASQGISNNLN | 969 | RASSLQS | 1141 | CQQANSYPLT | 1212 |
| | | MH | | YA | | FIW | | | | | | F | |
| 005S-E05 | Fzd8 | GTFSSYAI | 207 | GGIIPIFGTAN | 408 | CAIRAFDIW | 591 | RASQSISSYLN | 996 | AASSLQS | 1071 | CQQSYSTPLT | 1264 |
| | | S | | YA | | | | | | | | F | |
| 005S-C06 | Fzd8 | ZTFSZYD | 311 | SSISSSSHYKY | 542 | CARVRSKAVAGTLP | 844 | RASQSVSSSYL | 1017 | AASRRAT | 1068 | CQQYSNWPF | 1316 |
| | | MH | | YA | | KRLFDIW | | S | | | | TF | |
| 005S-E06 | Fzd8 | YTFTSYYM | 301 | GWMNPNSG | 490 | CARGNPTSGHIVVV | 747 | QASQDISNRLN | 942 | SASRLQI | 1147 | CQQSYRTPRT | 1246 |
| | | H | | NTGYA | | PAATFSDYW | | | | | | F | |
| 005S-G06 | Fzd8 | GTFSZZTIS | 213 | GWMNPDSG | 486 | CARWAFPIPNAFDI | 847 | RASQSISSYLN | 996 | AASSLQS | 1071 | CQQSYSTPLT | 1264 |
| | | | | KTGYA | | W | | | | | | F | |
| 005S-H06 | Fzd8 | YTFTNNF | 292 | GGIFPIYGIST | 403 | CARDRPSSSWYAFD | 688 | RASQGISNNLN | 969 | DASTLQT | 1089 | CQQSFSAPITF | 1233 |
| | | MH | | YA | | YW | | | | | | | |
| 005S-A08 | Fzd9 | GTFSZYAI | 212 | GGIIPIFGTAN | 408 | CARGGLLRFGDGWG | 729 | RASQSISSKSL | 995 | GASTRAT | 1111 | CQQYGIAPTF | 1299 |
| | | S | | YA | | MGMDVW | | A | | | | | |
| 005S-C08 | Fzd9 | YTFTDYH | 285 | GWINAGNGN | 465 | CARASSWYLHYYYG | 652 | RASQSISSYLN | 996 | AASSLQS | 1071 | CQQSYSTPLT | 1264 |
| | | MH | | TTYA | | MDVW | | | | | | F | |
| 005S-E08 | Fzd9 | FIFSZYAM | 85 | SSISAAGAYK | 538 | CARRGYSSGWRDAF | 808 | RASQSISSYLN | 996 | AASSLQS | 1071 | CQQSYSTPLT | 1264 |
| | | S | | YYA | | DIW | | | | | | F | |
| 005S-F08 | Fzd9 | YTFTSYYM | 301 | GWINAGNGN | 465 | CAKDVNYW | 607 | QASQGISNYLN | 947 | AASSLQS | 1071 | CQQTYSTPTT | 1287 |
| | | H | | TTYA | | | | | | | | F | |
| 005S-H08 | Fzd9 | GTFSSYAI | 207 | GRIIPILGTPN | 440 | CARDRLAFDYW | 686 | RASQSISSYLN | 996 | AASSLQS | 1071 | CQQSYSTPLT | 1264 |
| | | S | | YA | | | | | | | | F | |
| 005S-A09 | Fzd9 | FAFSSHW | 80 | SAISVSGGTTF | 509 | CARWGKRLRGSPYY | 849 | RASQSIGSNLD | 983 | RASTLQS | 1143 | CQQSYSTPSF | 1267 |
| | | MH | | YA | | FDYW | | | | | | | |
| 005S-F09 | Fzd9 | FTFSIYGM | 123 | SGISWNSGNI | 521 | CARGPLPTKIGGHY | 749 | RASQSISSYLN | 996 | AASSLQS | 1071 | CQQSYSTPLT | 1764 |
| | | H | | GYA | | MDVW | | | | | | F | |
| 005S-B10 | Fzd9 | FTFSTXW | 154 | AVMYSGGTT | 387 | CARLSYYYDSSGPK | 788 | RASQGISNNLN | 969 | AASSLQS | 1071 | CQQGNNFPL | 1218 |
| | | MS | | YYA | | GDAFDIW | | | | | | TF | |
| 005S-C10 | Fzd9 | FSLSSYGM | 99 | SSISSSSSYIYY | 543 | CARSGMVKWLRSFD | 814 | RASQDIGSFLA | 958 | AASSLQS | 1071 | CQKYNRAPFT | 1203 |
| | | H | | A | | YW | | | | | | F | |
| 005S-E10 | Fzd9 | FTFTSSAM | 162 | GVINPGSGGT | 459 | CARGYGDYVWGEN | 770 | RASQSISSYLN | 996 | AASSLQS | 1071 | CQQSYSTPLT | 1264 |
| | | Q | | SYN | | YFDYW | | | | | | F | |
| 005S-F10 | Fzd9 | YTLSNYGI | 306 | GWISAYNGD | 475 | CARFDYFGGMDVW | 713 | RASQSISSYLN | 996 | AASSLQS | 1071 | CQQSYSTPLT | 1264 |
| | | S | | TKYA | | | | | | | | F | |
| 005S-G10 | Fzd9 | YTFTRYAV | 294 | GGIIPFFNTVN | 404 | CAADRSPYYYDSSG | 576 | RASQGISNNLN | 969 | QASSLDS | 1138 | CQQSYNVPY | 1244 |
| | | H | | YA | | YYPDAFDIW | | | | | | TF | |
| 005S-A11 | Fzd9 | FTFSSYD | 142 | SGISWNSGYI | 522 | CAKGSLLLGYYGMD | 617 | RASQSISNNLN | 990 | DASTLKR | 1088 | CQQSYNTPRT | 1242 |
| | | MN | | GYA | | VW | | | | | | F | |
| 005S-812 | Fzd10 | FTZSSYD | 176 | SSISGLGGSTY | 540 | CAREAGTTGGWFDP | 702 | RASQSISSYLN | 996 | AASSLQS | 1071 | CQQSYSTPLT | 1264 |
| | | MH | | ZA | | W | | | | | | F | |
| 005S-D12 | Fzd10 | FTFSDHY | 118 | STIGPAGDTY | 551 | CARASTSGDYSLW | 653 | RASQSVSTSYL | 1021 | GASTRAT | 1111 | CQQYGASPW | 1298 |
| | | MD | | VP | | | | A | | | | TF | |
| 006S-B01 | Fzd10 | YTFTNYCT | 293 | GLVCPSDGST | 428 | CARRTSASDIW | 812 | RASQSISSYLN | 996 | AASSLQS | 1071 | CQQSYSTPLT | 1764 |
| | | R | | SYA | | | | | | | | F | |
| 006S-C01 | Fzd10 | FTFTZSAV | 166 | GGFDPEDGET | 401 | CTTDPLELPWYW | 917 | RASQGISSALA | 973 | SASNLQS | 1146 | CQQAISFPLTF | 1207 |
| | | Q | | IYA | | | | | | | | | |
| 006S-E01 | Fzd10 | YTFTGYY | 288 | GIINPSSGRTD | 423 | CARDLTYYYDSSGH | 678 | RASQSVTSSLA | 1022 | GASTRAT | 1111 | CQQYNDWPP | 1308 |
| | | MH | | YA | | SPLGAFDIW | | | | | | TF | |
| 006S-G01 | Fzd10 | FTFSDFG | 117 | AGISGGGGST | 352 | CARDSDFWYYYGM | 694 | KSSQSVLYSSN | 934 | STNTRSS | 1151 | CQHRNFF | 1199 |
| | | MN | | DYA | | DVW | | NKNYLA | | | | | |
| 006S-B02 | Fzd10 | VSFSGYA | 276 | AYINSGSSEM | 391 | CAREEWELFGMDV | 704 | RASQSISSYLN | 996 | AASSLQS | 1071 | CQQSYSTPLT | 1264 |
| | | MH | | NYA | | W | | | | | | F | |
| 006S-G02 | Fzd10 | YTVTSYA | 308 | GGIIPIFGTAK | 406 | CAKGGQWLYGMDV | 610 | RASQSISSYLN | 996 | AASSLQS | 1071 | CQQSYSTPLT | 1264 |
| | | MH | | YA | | W | | | | | | F | |
| 014S-A01 | Fzd1 | YTFTSYYM | 301 | GWVSPSSGN | 495 | CARDEGAGYVYYYM | 663 | RASQSISSYLN | 996 | AASSLQS | 1071 | CQQSYSTPLT | 1264 |
| | | H | | TAYA | | DVW | | | | | | F | |
| 014S-C01 | Fzd2 | FTFSNYA | 130 | SAIGTGGGTY | 502 | CATAYRRPGGLDVW | 866 | RSSQSLLHSDG | 1032 | LGSNRAS | 1131 | CMQNTHWP | 1186 |
| | | MT | | YA | | | | KTYLY | | | | LTR | |
| 014S-F01 | Fzd4 | FTFSSYA | 141 | SVISTSGDTVL | 559 | CARGGSSDVR | 735 | RASQSISSYLN | 996 | AASSLQS | 1071 | CQQSYSTPLT | 1264 |
| | | MH | | YT | | | | | | | | F | |
| 014S-H01 | Fzd4 | FTFSNYG | 131 | SYISSSSSTIYY | 570 | CARAALGYCTGGVC | 634 | RASQGISNNLN | 969 | AASRLQS | 1067 | CQQSYSPPLT | 1255 |
| | | MH | | A | | PPVDYW | | | | | | F | |
| 014S-C03 | Fzd7 | YTFTNNF | 292 | GIIZPGGGRTI | 426 | CAKGDYGALDYW | 609 | RASQSISSYLN | 996 | AASSLQS | 1071 | CQQSYSTPLT | 1264 |
| | | MH | | YA | | | | | | | | F | |
| 014S-D03 | Fzd7 | FNFSSYT | 87 | SVIYGGGNTN | 561 | CARGGSGGNLSYW | 733 | RASQSISSYLN | 996 | AASSLQS | 1071 | CQQSYSTPLT | 1264 |
| | | MR | | YA | | | | | | | | F | |
| 014S-F03 | Fzd8 | YTFTNNF | 292 | GGIIPLFGTAN | 415 | CARLVVRGGYGMD | 790 | RASQSISSYLN | 996 | AASSLQS | 1071 | CQQSYSTPLT | 1264 |
| | | MH | | YA | | VW | | | | | | F | |
| 014S-A04 | Fzd8 | GTFSSYAI | 207 | GWISSFNGNT | 482 | CARADDYYDSSGYY | 635 | RASQSISSYLN | 996 | AASSLQS | 1071 | CQQSYSTPLT | 1264 |
| | | S | | KYA | | YGFDYW | | | | | | F | |
| 014S-C04 | Fzd8 | FTFSSYTM | 148 | SRINGDGSNT | 530 | CARGWAGFDYW | 768 | RASQSISSYLN | 996 | AASSLQS | 1071 | CQQSYSTPLT | 1264 |
| | | N | | NYA | | | | | | | | F | |
| 014S-D04 | Fzd8 | HTFSGYHI | 222 | GWINAGNGN | 465 | CARDLSPMVRGVIS | 676 | RASQSISSYLN | 996 | AASSLQS | 1071 | CQQSYSTPLT | 1264 |
| | | H | | TTYA | | GMDVW | | | | | | F | |
| 014S-E05 | Fzd8 | YTFTNNF | 292 | GIISPGGGRTI | 424 | CAKGDYGALDYW | 609 | RASQSISSYLN | 996 | AASSLQS | 1071 | CQQSYSTPLT | 1264 |
| | | MH | | YA | | | | | | | | F | |
| 014S-E06 | Fzd10 | FTFGNYD | 109 | SSLSWNSGTI | 548 | CARDSSSGVVYASY | 695 | RASQSISRYLN | 993 | AASSLQS | 1071 | CLQHHSYPFT | 1169 |
| | | MN | | VYA | | YGMDVW | | | | | | F | |
| 027S-C02 | Fzd5 | YTLTTWY | 307 | GWMNPNSG | 489 | CARGALGMDVW | 716 | QASQDISNYLN | 943 | AASSLHT | 1069 | CQESYSSPYTF | 1195 |
| | | MX | | NTAYA | | | | | | | | | |
| 027S-E03 | Fzd8 | YTFTGHY | 287 | GWMNPNSG | 490 | CARGTGGFDYW | 764 | RASQSISSYLN | 996 | AASSLQS | 1071 | CQQSYSTPYT | 1271 |
| | | MH | | NTGYA | | | | | | | | F | |
| 027S-F03 | Fzd8 | YTFTGHYI | 286 | GWMNPISGN | 487 | CARSTPFDPW | 822 | RASHDIGTFLA | 954 | AASTLQS | 1075 | CQQSYRTPYT | 1247 |
| | | H | | TGYA | | | | | | | | F | |
| 027S-G03 | Fzd8 | YTFTHSYI | 289 | GWINAKSGG | 466 | CARGDYDFWSGYHE | 721 | QATQNIKKYLN | 948 | KASTLES | 1123 | CQQSYSTPLT | 1264 |
| | | H | | TFYA | | YYYYGMDVW | | | | | | F | |
| 027S-H03 | Fzd8 | YTFTSYYM | 301 | GWINPNSGG | 471 | CARAPLDGSGSYYV | 643 | RSSQSLLHSNG | 1036 | LGSNRAS | 1131 | CMQALQTPQ | 1176 |
| | | H | | TNYA | | DW | | YNYLD | | | | TF | |
| 027S-A04 | Fzd8 | YTFTNHF | 291 | GWISPNRGG | 478 | CARDCSGGSCYSHFD | 662 | RASQSISRSLA | 991 | AASNLQS | 1065 | CQQAYSFPQT | 1215 |
| | | MH | | TNYA | | YW | | | | | | F | |
| 027S-B04 | Fzd8 | FTVGSWY | 172 | SAIGTGGGTY | 502 | CAKDITPYGDYSIL | 599 | RASQAISNYLN | 956 | AASSLQS | 1071 | CQQTFSPPLT | 1275 |
| | | MS | | YA | | SHW | | | | | | F | |
| 027S-C04 | Fzd8 | YTFTSHW | 295 | GGIIPIFGTTN | 412 | CARDSSSWYSYYYY | 696 | RASQGINNYLA | 964 | QASNLES | 1137 | CQQTYSSPLT | 1285 |
| | | MH | | YA | | YMDVW | | | | | | F | |
| 027S-D04 | Fzd8 | YTFTTYFM | 302 | GWIYPNSGG | 485 | CTTDLRYDSSGPAAF | 916 | QASQDIDNYL | 937 | AASSLQS | 1071 | CQQSYSTPVT | 1269 |
| | | H | | TKYA | | DIW | | N | | | | F | |
| 027S-E04 | Fzd8 | FTFSDHY | 119 | SGISGSGGTT | 516 | CATYGDFGYFDLW | 875 | RASQGIRNDLG | 966 | AASTLQS | 1075 | CQQAYSFPW | 1216 |
| | | MS | | YYA | | | | | | | | TF | |
| 027S-C05 | Fzd8 | GSFSTSVF | 191 | GRIIPLFGTTN | 441 | CVKDRAWGFDYW | 924 | RASQGIRNDLA | 965 | AASSLQR | 1070 | CQQSYSKPTF | 1251 |
| | | G | | YA | | | | | | | | | |
| 027S-D05 | Fzd8 | YTFTSYYM | 301 | GWINPKSGG | 467 | CARGGFVFDYW | 725 | QASQDISNYLN | 943 | ASSTLQT | 1078 | CQQSYSAPYT | 1248 |
| | | H | | TNYA | | | | | | | | F | |
| 027S-E05 | Fzd8 | GTFSSYAI | 207 | GMINPSGGS | 432 | CARQAGLHCSSTSC | 802 | RASQGITKSLA | 975 | AASNLQL | 1064 | CQQYNTFPIT | 1314 |
| | | S | | TTYA | | YLGNWFDPW | | | | | | F | |
| 027S-F0S | Fzd8 | GTFNRYGI | 202 | GGIIPRLGAT | 417 | CAKGNWAFDIW | 616 | RASQSISTYLA | 998 | GASTRAT | 1111 | CQQYGSSPTF | 1303 |
| | | S | | DYA | | | | | | | | | |
| 027S-G05 | Fzd8 | GTFSSYAI | 207 | GWISPYNGN | 479 | CARGVWTTPMGGG | 766 | RASQSISSYLN | 996 | YASSLQN | 1155 | CQQSYSTPFT | 1260 |
| | | S | | TKYA | | GNWFDPW | | | | | | F | |
| 027S-H05 | Fzd8 | GTFGNYGI | 198 | GWINPNSGG | 471 | CARETTDYYYGMDV | 711 | RASQSIGTYLN | 986 | DASNLET | 1081 | CQQANSFPLT | 1209 |
| | | N | | TNYA | | W | | | | | | F | |
| 027S-A06 | Fzd8 | GTFSSYAI | 206 | GVIDPSTGGT | 457 | CARVLPGDSSGWYR | 838 | RASQGISNNLN | 969 | KASSLES | 1120 | CQQANSFPIT | 1208 |
| | | N | | NYA | | GYYYYYGMDVW | | | | | | F | |
| 027S-C06 | Fzd8 | GTFTSYPIS | 217 | GWINTYNGN | 473 | CARDLDSGFDLW | 673 | RASQGVGDYL | 976 | DAS N LQS | 1082 | CQQHNAYPL | 1221 |
| | | | | TIYA | | | | A | | | | TF | |
| 027S-D06 | Fzd8 | GTFSSYAI | 207 | GWISAYNGH | 476 | CARGGYSYGTVFDY | 739 | RASQDISSWLA | 961 | KASTLES | 1123 | CQQSYGAPLT | 1239 |
| | | S | | TNYA | | W | | | | | | F | |
| 027S-E06 | Fzd8 | YTFTKDY | 290 | GGIIPIFGTAN | 408 | CARGLPPAAGGGGY | 744 | RASQNVNDWL | 980 | SASNLQS | 1146 | CQQSYSTPFT | 1260 |
| | | MH | | YA | | FQHW | | A | | | | F | |
| 027S-F06 | Fzd8 | FTFSSYA | 141 | AVTWYDGSN | 389 | CAKDLVPYCSGGSC | 602 | RASQSISSYLN | 996 | GASNLQS | 1101 | CQQSYSTPLT | 1264 |
| | | MH | | KYYA | | PPSGW | | | | | | F | |
| 027S-G06 | Fzd5 | YTFTDYY | 285 | GWMSPNSG | 491 | CARGKSGSFDYW | 743 | RASQSVNNTY | 1009 | GTSTRAT | 1116 | CQQYDTSPPT | 1296 |
| | | MH | | NAGFA | | | | VA | | | | F | |
| 027S-H06 | Fzd5 | YTFTGHYI | 286 | GIINPSGGSTS | 422 | CARGFCSGGSCLWY | 722 | RASQSISSYLN | 996 | AASSLQS | 1071 | CQQSYTTPFT | 1274 |
| | | H | | YA | | GMDVW | | | | | | F | |
| 027S-A07 | Fzd5 | GTFGSYAI | 199 | GGIIPIFGTAN | 408 | CAKDNGWYFDLW | 603 | RASQSISTNVN | 997 | AASSLQS | 1071 | CQQSYSTPYT | 1271 |
| | | T | | YA | | | | | | | | F | |
| 029S-B01 | Fzd1 | GTFSSYAI | 207 | GRINPHNGN | 1352 | CARATRVSAAGTVH | 1363 | KSSQSVLHSSN | 1389 | STNTRSS | 1151 | CQQYYSTPFT | 1433 |
| | | S | | TNYA | | FQHW | | NKNYLA | | | | F | |
| 029S-D01 | Fzd2 | YTFTRYYI | 1344 | GWMNPNSG | 490 | CARVRFLEEMDVW | 1385 | RASQSLSSWLA | 1403 | DASTLQS | 1412 | CQQAISFPLTF | 1207 |
| | | H | | NTGYA | | | | | | | | | |
| 029S-C02 | Fzd2 | GTFSSYGI | 1329 | GIINPSGGSTS | 1350 | CARGDIVATMGMK | 1369 | RASQDISNNLN | 1391 | GASHLQT | 1414 | CQQANSFPV | 1210 |
| | | S | | YA | | KVDYYYYMDVW | | | | | | TF | |
| 029S-F02 | Fzd2 | YTFTRYYL | 1345 | GWMNPNSG | 490 | CARGIGYW | 1372 | RASQGISNYLA | 971 | AASRLQT | 1407 | CLQYNTYPW | 1420 |
| | | H | | NTGYA | | | | | | | | TF | |
| 029S-H02 | Fzd2 | GTFSTYAI | 210 | GDIIPIFGSAN | 1348 | CARELGLGWFDPW | 1367 | RSSQSLLHSNG | 1036 | LGSSRAS | 1417 | CMQALQTPL | 1175 |
| | | S | | YA | | | | YNYLD | | | | TF | |
| 030S-A02 | Fzd7 | YTFTDYY | 285 | GWMNPNSG | 1358 | CARGDINYGNFDYW | 1368 | RASQSISSYLN | 996 | KASTLHN | 1415 | CQQAISFPLTF | 1207 |
| | | MH | | STGYA | | | | | | | | | |
| 030S-B02 | Fzd3 | YTFTDYY | 285 | GWMNPNSG | 490 | CARQGGSYSMGLDP | 1379 | RASQSITTYLN | 1402 | KTSSLQS | 1416 | CQQGDSFPYT | 1422 |
| | | MH | | NTGYA | | W | | | | | | F | |
| 029S-E03 | Fzd3 | YTFTGYY | 1342 | GWINPNSGN | 1354 | CARSYYGVIDAFDI | 1383 | RASCISISSYL | 996 | AASSLQT | 1408 | CQQSFRLPLT | 1423 |
| | | MH | | TGYA | | W | | N | | | | F | |
| 029S-G03 | Fzd3 | YTFTNYY | 1343 | GWMNPNSG | 490 | CAREDDFWSGGGM | 1365 | RASQSIISYLN | 1400 | AASSLQS | 1071 | CQQSWRFPY | 1426 |
| | | MH | | NTGYA | | DVW | | | | | | TF | |
| 030S-E03 | Fzd3 | FTFSDYY | 122 | SAISGSGHST | 1359 | CAREGLRGWSIFDI | 1366 | KSSQSVLYSSN | 934 | WASTRES | 1418 | CQQYYSTPPT | 1434 |
| | | MS | | YYA | | W | | NKNYLA | | | | F | |
| 029S-D05 | Fzd3 | YTFTDHYF | 1338 | GWANPSSGN | 1353 | CARSRLRWDWYFDL | 1382 | RASQTISSYLN | 1405 | DASNLET | 1081 | CQQSYSIPLTF | 1250 |
| | | H | | TGTA | | W | | | | | | | |
| 030S-H03 | Fzd3 | FSFSSHA | 1327 | SAIGTGGGTY | 502 | CANPKHYW | 1361 | RASQGVSTYLA | 1396 | AASSLQS | 1071 | CQQYYSSPQT | 1432 |
| | | MS | | YA | | | | | | | | F | |
| 029S-B06 | Fzd3 | YTFSRHYI | 1337 | GWMNPNSG | 490 | CARGGHTGYSSGWY | 1370 | RASQSVSSWL | 1404 | AASSLQS | 1071 | CQQAFRFPPT | 1421 |
| | | H | | NTGYA | | NHW | | A | | | | F | |
| 029S-E06 | Fzd3 | YWFTASY | 1347 | GWMKPDSG | 1356 | CARRSSSWGWYFDL | 1380 | RASQNINSWL | 1397 | AASSLQS | 1071 | CQQYYSFPLT | 1431 |
| | | MH | | NTGYA | | W | | A | | | | F | |
| 029S-H06 | Fzd3 | YTFAKYYI | 1335 | GWMNPNSG | 490 | CARHKRHTPYAFDI | 1378 | RASQSISSYLN | 996 | AASSLQS | 1071 | CQQSHSTPLT | 1424 |
| | | H | | NTGYA | | W | | | | | | F | |
| 029S-G07 | Fzd3 | YTFTDSYI | 1339 | GWISAYNGN | 477 | CARGSGYFDLW | 1377 | RASQSISKWLA | 1401 | GASTLQS | 1109 | CQQAYSFPW | 1216 |
| | | H | | TNYA | | | | | | | | TF | |
| 029S-H08 | Fzd3 | YTFTGHY | 1340 | GWMNPNSG | 490 | CARVGDYDRFNWYF | 1384 | RASRTVYNFLA | 1406 | DASNLRT | 1411 | CQQSYSTPPT | 1427 |
| | | MH | | NTGYA | | DLW | | | | | | F | |
| 029S-F09 | Fzd3 | GTFSSYAI | 1328 | GWISAYNGN | 477 | CARANRGLRKNYYY | 1362 | RASQSIARYLN | 1398 | GASSLQS | 1105 | CQQSYNTPW | 1243 |
| | | T | | TNYA | | GMDVW | | | | | | TF | |
| 030S-F04 | Fzd3 | YTFTSSYIH | 1346 | GIINPSGGGA | 1349 | CARWTTVVTGAAFD | 1386 | RASQGIRNDLN | 1393 | DASNLGT | 1410 | CQQSSRIPPT | 1425 |
| | | | | VYA | | IW | | | | | | F | |
| 029S-A10 | Fzd3 | YSFTGYYL | 1333 | GWINPNSGG | 471 | CARDHGTMIAVAGT | 1364 | RASQGISKYLA | 1394 | AASSLQS | 1071 | CQQSYSTPW | 1270 |
| | | H | | TNYA | | FDYYYYMDVW | | | | | | TF | |
| 029S-B11 | Fzd3 | YTFNGYY | 1336 | GIVNPSGGGT | 1351 | CARGGNYGRWLQP | 1371 | QASQDISNYLN | 943 | GASALRS | 1413 | CQQTKSFPLT | 1429 |
| | | MH | | NYA | | WYFDLW | | | | | | F | |
| 029S-D11 | Fzd3 | HTFTSHY | 1331 | GWMNPNSA | 1357 | CARGLGYFDLW | 1374 | RASQDISRGLG | 1392 | AASTLYR | 1409 | CQQAYSFPW | 1216 |
| | | MH | | NAGYA | | | | | | | | TF | |
| 030S-H05 | Fzd7 | YSFTNYY | 1334 | GWMNPNSG | 490 | CARSPDFWSGEGYF | 1381 | RASQSIGNYLN | 1399 | AASSLQS | 1071 | CQQANSFPLT | 1209 |
| | | MH | | NTGYA | | DLW | | | | | | F | |
| 030S-A06 | Fzd7 | YMFTGHD | 1332 | GRIIPILGIANY | 438 | CARGIHGDYGLDYYY | 1373 | RASQAIGRRLA | 1390 | AASSLQS | 1071 | CQQYDTYWT | 1430 |
| | | MH | | A | | MDVW | | | | | | F | |
| 029S-C12 | Fzd7 | YTFTGYY | 1342 | GWMNPNSG | 490 | CARGMEYW | 1375 | RASQGISSYLA | 974 | AASTLQS | 1075 | CLQYNTYPW | 1420 |
| | | MH | | NTGYA | | | | | | | | TF | |
| 030S-C06 | Fzd7 | YTFTGYYI | 1341 | GWMDPNSG | 1355 | CARGPADFWSGYKN | 1376 | RASQGISSWLA | 1395 | DASSLQS | 1086 | CQQSYSTPYS | 1428 |
| | | H | | YTGYA | | DYFDFW | | | | | | F | |
| 4Al2 | Fzd5 | GYTFTNY | 1330 | WIYPRDGSTK | 1360 | CVRSAWGFAY | 1387 | KASQDVGTAV | 1388 | WASTRHT | 1419 | QQYSTYPLT | 1419 |
| | | DIN | | YNEKFKG | | | | A | | | | | |

[0243] Table 1B provides clone IDs, the sequence identifier number of the antibody heavy chain fragment and/or light chain fragment, if present, for illustrative clones. In certain embodiments, the Fzd binding domain is an Fab or was derived from an Fab, so the heavy chain of Table 1B includes VH and CH1 sequence, but not CH2 or CH3 sequences. In certain embodiments, the Fzd binding domain is a VHH or sdAb® or was derived from a VHH or sdAb, so Table 1B includes the VHH domain. Table 1B also provides data demonstrating binding of these clones to various Fzd receptors. The K_{d} values were determined by BLI as described above. Blank entries denote that the binding to the specific Fzd receptor has not yet been determined. The entry of “n.b.” indicates no binding. As shown in Table 1B, a subset of antibody fragments exhibited mono-specificity for a single Fzd, or specificity for a sub-family of Fzd as determined by binding affinity in Octet BLI.

TABLE 1B
Clone IDs, Heavy Chain (HC) and Light Chain
(LC) Seq ID Nos, and Binding Characteristics.

| | HC | LC | | | | | | | | | | | |
|---|---|---|---|---|---|---|---|---|---|---|---|---|---|
| | SID | SID | Confirmed | Kd (nM) | | | | | | | | | |
| Clone ID | NO | NO | Binding | Fz1 | Fz2 | Fz3 | Fz4 | Fz5 | Fz6 | Fz7 | Fz8 | Fz9 | Fz10 |
| 001S-B01 | 1 | 38 | Fzd1, 2, 7, 9 | ** | ** | n.b. | n.b. | n.b. | n.b. | ** | n.b. | * | n.b. |
| 001S-E02 | 2 | 39 | Fzd1, 2, 7 | * | ** | n.b. | n.b. | n.b. | n.b. | * | n.b. | n.b. | n.b. |
| 001S-G02 | 3 | 40 | Fzd1, 2, 7 | ** | ** | n.b. | n.b. | n.b. | n.b. | ** | n.b. | n.b. | n.b. |
| 001S-H02 | 4 | 41 | Fzd1, 2, 7 | ** | ** | n.b. | n.b. | n.b. | n.b. | ** | n.b. | n.b. | n.b. |
| 001S-A03 | 5 | 42 | Fzd1, 2, 7, 9 | * | ** | n.b. | n.b. | n.b. | n.b. | ** | n.b. | ** | n.b. |
| 001S-B03 | 6 | 43 | Fzd1, 2, 7 | * | * | n.b. | n.b. | n.b. | n.b. | * | n.b. | n.b. | n.b. |
| 004S-G06 | 7 | 44 | Fzd5, 8 | | | | | * | | | * | | |
| 002S-B01 | 8 | | Fzd1 | * | | | | | | | | | |
| 002S-C02 | 9 | | Fzd1 | * | | | | | | | | | |
| 002S-E02 | 10 | | Fzd1 | ** | | | | | | | | | |
| 002S-G02 | 11 | | Fzd1 | ** | | | | | | | | | |
| 002S-F03 | 12 | | Fzd1 | ** | | | | | | | | | |
| 002S-A04 | 13 | | Fzd1 | * | | | | | | | | | |
| 002S-B04 | 14 | | Fzd1 | ** | | | | | | | | | |
| 002S-D04 | 15 | | Fzd1 | ** | | | | | | | | | |
| 004S-H04 | 16 | 45 | Fzd 5 | | | | | ** | | | | | |
| 001S-A04 | 17 | 46 | Fzd1, 2, 5, 7, 8 | * | * | n.b. | n.b. | * | n.b. | * | * | n.b. | n.b. |
| 003S-E07 | 18 | 47 | Fzd2 | | ** | | | | | | | | |
| 003S-D10 | 19 | 48 | Fzd4 | n.b. | n.b. | | * | n.b. | n.b. | | n.b. | n.b. | n.b. |
| 004S-B08 | 20 | 49 | Fzd6 | n.b. | n.b. | | n.b. | n.b. | ** | | n.b. | n.b. | n.b. |
| 004S-D08 | 21 | 50 | Fzd6 | n.b. | n.b. | | n.b. | n.b. | ** | | n.b. | n.b. | n.b. |
| 004S-C09 | 22 | 51 | Fzd6 | n.b. | n.b. | | n.b. | n.b. | ** | | n.b. | n.b. | n.b. |
| 004S-F10 | 23 | 52 | Fzd6 | n.b. | n.b. | | n.b. | n.b. | ** | | n.b. | n.b. | n.b. |
| 004S-A11 | 24 | 53 | Fzd6 | n.b. | n.b. | | n.b. | n.b. | ** | | n.b. | n.b. | n.b. |
| 004S-A12 | 25 | 54 | Fzd6 | n.b. | n.b. | | n.b. | n.b. | ** | | n.b. | n.b. | n.b. |
| 005S-B07 | 26 | 55 | Fzd 9 | n.b. | n.b. | | n.b. | n.b. | n.b. | | n.b. | ** | n.b. |
| 005S-D08 | 27 | 56 | Fzd 9 | n.b. | n.b. | | n.b. | n.b. | n.b. | | n.b. | ** | n.b. |
| 005S-E09 | 28 | 57 | Fzd 9 | n.b. | n.b. | | n.b. | n.b. | n.b. | | n.b. | ** | n.b. |
| 005S-H10 | 29 | 58 | Fzd 9 | n.b. | n.b. | | n.b. | n.b. | n.b. | | n.b. | ** | n.b. |
| 005S-B11 | 30 | 59 | Fzd 9 | n.b. | n.b. | | n.b. | n.b. | n.b. | | n.b. | ** | n.b. |
| 005S-D11 | 31 | 60 | Fzd 9 | n.b. | n.b. | | n.b. | n.b. | n.b. | | n.b. | ** | n.b. |
| 014S-G02 | 32 | 61 | Fzd6 | n.b. | n.b. | | n.b. | n.b. | 414 | | n.b. | n.b. | n.b. |
| 014S-B04 | 33 | 62 | Fzd 8 | n.b. | n.b. | | n.b. | n.b. | n.b. | | ** | n.b. | n.b. |
| 014S-B06 | 34 | 63 | Fzd 9 | n.b. | n.b. | | n.b. | n.b. | n.b. | | n.b. | ** | n.b. |
| 014S-G06 | 35 | 64 | Fzd10 | n.b. | n.b. | | n.b. | n.b. | n.b. | | n.b. | n.b. | ** |
| 014S-A07 | 36 | 65 | Fzd10 | n.b. | n.b. | | n.b. | n.b. | n.b. | | n.b. | n.b. | ** |
| 017S-B09 | 37 | | Fzd8 | n.b. | n.b. | | n.b. | n.b. | n.b. | | * | n.b. | n.b. |
| 004S-D01 | 66 | 67 | Fzd4 | | | | * | | | | | | |
| 004S-E09 | 68 | 69 | Fzd6 | | | | | | | | | | |
| 004S-F09 | | | Fzd6 | | | | | | ** | | | | |
| 004S-H09 | | | Fzd6 | | | | | n.b. | ** | | n.b. | | n.b. |
| 004S-B10 | | | Fzd6 | | | | | | ** | | | | |
| 004S-C10 | | | Fzd6 | n.b. | n.b. | | n.b. | n.b. | ** | n.b. | n.b. | | n.b. |
| 004S-F10 | | | Fzd6 | n.b. | n.b. | | n.b. | n.b. | ** | | n.b. | n.b. | n.b. |
| 004S-G10 | | | Fzd6 | | | | | n.b. | ** | | n.b. | | n.b. |
| 004S-A11 | | | Fzd6 | n.b. | n.b. | | n.b. | n.b. | ** | | n.b. | n.b. | n.b. |
| 004S-B11 | | | n.b. | | | | | | n.b. | | | | |
| 004S-D11 | | | Fzd6 | n.b. | n.b. | n.b. | n.b. | n.b. | ** | n.b. | n.b. | n.b. | n.b. |
| 004S-E11 | | | n.b. | | | | | n.b. | n.b. | | n.b. | | n.b. |
| 004S-F11 | | | Fzd6 | | | | | | ** | | | | |
| 004S-G11 | | | Fzd6 | | | | | | * | | | | |
| 004S-A12 | | | Fzd6 | n.b. | n.b. | | n.b. | n.b. | ** | | n.b. | n.b. | n.b. |
| 004S-B12 | | | Fzd6 | | | | | | ** | | | | |
| 004S-C12 | | | n.b. | | | | | | | | | | |
| 004S-D12 | | | n.b. | | | | | | n.b. | | | | |
| 004S-F12 | | | n.b. | | | | | | | | | | |
| 004S-F12 | | | n.b. | n.b. | n.b. | | | | | n.b. | | | |
| 004S-G12 | | | n.b. | n.b. | n.b. | | | | | n.b. | | | |
| 005S-B02 | | | n.b. | | | | | n.b. | | | n.s. | | |
| 005S-C02 | | | n.b. | n.b. | n.b. | | n.b. | n.b. | n.b. | | n.b. | n.b. | n.b. |
| 005S-D02 | | | Fzd5, 8 | n.b. | n.b. | n.b. | n.b. | ** | n.b. | n.b. | ** | n.b. | n.b. |
| 005S-E02 | | | Fzd5, 8 | n.b. | n.b. | | n.b. | ** | n.b. | | ** | n.b. | n.b. |
| 005S-H02 | | | Fzd5, 8 | | | | | ** | | | ** | | |
| 005S-A03 | | | Fzd5, 8 | n.b. | n.b. | | n.b. | ** | n.b. | | ** | n.b. | n.b. |
| 005S-C03 | | | n.s. | | | | | | | | n.s. | | |
| 005S-E03 | | | n.s. | | | | | n.s. | | | n.s. | | |
| 005S-F03 | | | Fzd8 | | | | | | | | ** | | |
| 005S-B04 | | | Fzd5, 8 | | | | | ** | | | n.s. | | |
| 005S-F04 | | | n.b. | | | | n.b. | | | | n.b. | | n.b. |
| 005S-G04 | | | Fzd5, 8 | | | | | ** | | | ** | | |
| 005S-H04 | | | n.b. | n.b. | n.b. | | n.b. | n.b. | n.b. | | n.b. | n.b. | n.b. |
| 005S-E05 | | | n.b. | | | | | | | | n.b. | | |
| 005S-G05 | | | Fzd5, 8 | n.b. | n.b. | | n.b. | ** | n.b. | | ** | n.b. | n.b. |
| 005S-H05 | | | Fzd5, 8 | n.b. | ** | | n.b. | * | n.b. | | * | n.b. | n.b. |
| 005S-D06 | | | Fzd8 | n.b. | n.b. | | n.b. | n.b. | n.b. | | ** | n.b. | n.b. |
| 005S-F06 | | | n.b. | n.b. | n.b. | | n.b. | n.b. | n.b. | | n.b. | n.b. | n.b. |
| 005S-G06 | | | n.s. | | | | | n.s. | | | n.s. | | |
| 005S-A07 | | | Fzd9, 10 | n.b. | n.b. | | n.b. | n.b. | n.b. | | n.b. | * | ** |
| 005S-B07 | | | Fzd9 | n.b. | n.b. | | n.b. | n.b. | n.b. | | n.b. | ** | n.b. |
| 005S-A08 | | | Fzd9 | | | | | | | | | ** | n.b. |
| 005S-B08 | | | Fzd9 | n.b. | n.b. | | n.b. | n.b. | n.b. | | n.b. | ** | n.b. |
| 005S-D08 | | | Fzd9 | n.b. | n.b. | | n.b. | n.b. | n.b. | | n.b. | ** | n.b. |
| 005S-E08 | | | Fzd9 | | | | | | | | | ** | n.b. |
| 005S-F08 | | | n.b. | | | | | | | | | n.b. | n.b. |
| 005S-C09 | | | Fzd9 | n.b. | n.b. | | n.b. | n.b. | n.b. | | n.b. | ** | n.b. |
| 005S-D09 | | | Fzd9 | | | | | | | | | ** | |
| 005S-E09 | | | Fzd9 | n.b. | n.b. | | n.b. | n.b. | n.b. | | n.b. | ** | n.b. |
| 005S-F09 | | | Fzd9 | | | | | | | | | ** | n.b. |
| 005S-A10 | | | Fzd9 | | | | | | | | | ** | n.b. |
| 005S-B10 | | | Fzd9 | | | | | | | | | ** | n.b. |
| 005S-E10 | | | Fzd9 | | | | | | | | | ** | n.b. |
| 005S-H10 | | | Fzd9 | n.b. | n.b. | | n.b. | n.b. | n.b. | | n.b. | ** | n.b. |
| 005S-B11 | | | Fzd9 | n.b. | n.b. | | n.b. | n.b. | n.b. | | n.b. | ** | n.b. |
| 005S-D11 | | | Fzd9 | n.b. | n.b. | | n.b. | n.b. | n.b. | | n.b. | ** | n.b. |
| 005S-G11 | | | n.b. | | | | | | | | | n.b. | |
| 005S-H11 | | | n.b. | | | | | | | | | | n.b. |
| 005S-E12 | | | Fzd10 | n.b. | n.b. | | n.b. | n.b. | n.b. | | n.b. | n.b. | ** |
| 006S-A01 | | | Fzd10 | | | | | | | | | | ** |
| 006S-H01 | | | n.b. | | | | | | | | | | n.b. |
| 006S-A02 | | | Fzd10 | n.b. | n.b. | | n.b. | n.b. | n.b. | | n.b. | n.b. | ** |
| 006S-D02 | | | n.b. | | | | | | | | | n.b. | n.b. |
| 006S-H02 | | | Fzd10 | n.b. | n.b. | | n.b. | n.b. | n.b. | | n.b. | n.b. | ** |
| 006S-A03 | | | n.b. | | | | | | | | | | n.b. |
| 006S-B03 | | | n.b. | | | | | | | | | | n.b. |
| 006S-C03 | | | n.b. | | | | | | | | | | |
| 014S-A01 | | | Fzd1, 2, 7 | * | ** | | | | | * | | | |
| 014S-B02 | | | n.b. | n.b. | n.b. | | n.b. | n.b. | n.b. | | n.b. | n.b. | n.b. |
| 014S-G02 | | | Fzd6 | n.b. | n.b. | | n.b. | n.b. | 350 | | n.b. | n.b. | n.b. |
| 014S-B03 | | | n.b. | | | | | | n.b. | | | | |
| 014S-C03 | | | Fzd1, 2, 7 | ** | ** | | | | | ** | | | |
| 014S-A04 | | | n.b. | | | | | n.b. | | | n.b. | | |
| 014S-B04 | | | Fzd8 | n.b. | n.b. | | n.b. | n.b. | n.b. | | ** | n.b. | n.b. |
| 014S-B05 | | | Fzd5, 8 | n.b. | n.b. | | n.b. | ** | n.b. | | ** | n.b. | n.b. |
| 014S-B06 | | | Fzd9 | n.b. | n.b. | | n.b. | n.b. | n.b. | | n.b. | ** | n.b. |
| 014S-F06 | | | n.s. | | | | | | | | | | |
| 014S-G06 | | | Fzd10 | n.b. | n.b. | | n.b. | n.b. | n.b. | | n.b. | n.b. | ** |
| 014S-A07 | | | Fzd10 | n.b. | n.b. | | n.b. | n.b. | n.b. | | n.b. | n.b. | ** |
| 017S-E08 | | | Fzd8 | | | | | n.b. | | | ** | | |
| 017S-H08 | | | n.b. | | | | | n.b. | | | n.b. | | |
| 017S-A09 | | | n.b. | n.b. | n.b. | | n.b. | n.b. | n.b. | | n.b. | n.b. | n.b. |
| 017S-B09 | | | Fzd8 | n.b. | n.b. | | n.b. | n.b. | n.b. | | * | n.b. | n.b. |
| 018S-F06 | | | Fzd4 | n.b. | n.b. | | ** | n.b. | n.b. | | n.b. | n.b. | n.b. |
| 018S-H06 | | | n.b. | | | | | n.b. | | | n.b. | | |
| 018S-B07 | | | n.b. | n.b. | n.b. | | n.b. | n.b. | n.b. | | n.b. | n.b. | n.b. |
| 017S-A10 | | | n.b. | n.b. | n.b. | | n.b. | n.b. | n.b. | | n.b. | n.b. | n.b. |
| 017S-B10 | | | n.b. | n.b. | n.b. | | n.b. | n.b. | n.b. | | n.b. | n.b. | n.b. |
| 017S-D10 | | | n.b. | n.b. | n.b. | | n.b. | n.b. | n.b. | | n.b. | n.b. | n.b. |
| 018S-H08 | | | n.b. | n.b. | n.b. | | n.b. | n.b. | n.b. | | n.b. | n.b. | n.b. |
| 018S-B09 | | | Fzd5, 8 | n.b. | n.b. | | n.b. | ** | n.b. | | ** | n.b. | n.b. |
| 021S-A01 | | | n.b. | n.b. | | | | n.b. | | | n.b. | | n.b. |
| 021S-E02 | | | Fzd5, 8 | n.b. | n.b. | | n.b. | ** | n.b. | | ** | n.b. | n.b. |
| 021S-G02 | | | n.s. | | | | | | | | | | |
| 021S-A03 | | | n.b. | n.b. | | | | n.b. | | | n.b. | | n.b. |
| 029S-B01 | | | n.b. | n.b. | | | | | | | | | |
| 029S-D01 | | | Fzd1, 2, 7 | ** | ** | | | | | ** | | | |
| 029S-C02 | | | Fzd1, 2, 7 | ** | ** | | | | | ** | | | |
| 029S-H02 | | | Fzd1 | ** | n.b. | | | | | n.b. | | | |
| 030S-A02 | | | Fzd7 | | | | | | | ** | | | |
| 029S-E06 | | | Fzd2, 6, 3 | | | * | | | | | | | |
| 030S-F04 | | | Fzd3 | | | ** | | | | | | | |
| 030S-H05 | | | Fzd7 | | | | | | | ** | | | |
| 030S-A06 | | | Fzd1, 2, 5 | * | * | | | ** | | * | | | |
| 029S-C12 | | | Fzd7 | | | | | | | ** | | | |
| 030S-C06 | | | Fzd1 | ** | ** | ** | | | | | | | |
| 001S-A01 | | | Fzd1, 2, 7 | ** | ** | | | | | ** | | | |
| 001S-H01 | | | Fzd1, 2, 7 | ** | ** | | | | | * | | | |

* Indicates <100 nM; ** indicates 100-2000 nM

### Example 2

### Alanine-Scanning Mutation of an Anti-Fzd Antibody Fragment

[0244] One antibody fragment, clone 001S-A04, was selected for alanine-scanning mutagenesis of CDRs, and the respective Fzd1 binding affinities of the various mutants were determined by Octet BLI as described in Example 1. As shown in Table 2, a large number of mutants bound Fzd1 with a similar affinity as the wild type antibody fragment, demonstrating that the Fzd1 antibodies and antigen-binding fragments thereof can tolerate amino acid modifications within the CDRs.

TABLE 2
001S-A04 alanine-scanning mutant CDR sequences and K_{D} (nM) to
biotinylated-Fzdd1 CRD as determined by Octet BLI

| | | | SEQ | | SEQ | | SEQ | | SEQ | | SEQ | | SEQ |
|---|---|---|---|---|---|---|---|---|---|---|---|---|---|
| Clone | Kd | | ID | | ID | | ID | | ID | | ID | | ID |
| ID | (nM) | CDRH1 | No. | CDRH2 | No. | CDRH3 | No. | CDRL1 | No. | CDRL2 | No. | CDRL3 | No. |
| WT | * | YTFTSYGIS | 300 | GWISAYNGNT | 477 | CASSKEKATYYYG | 860 | GLSSGSVSTNY | 931 | YTNTR | 1057 | CLLYLGRGI | 1165 |
| | | | | NYA | | MDVW | | YPS | | SS | | WVF | |
| VLL1A | * | YTFTSYGIS | 300 | GWISAYNGNT | 477 | CASSKEKATYYYG | 860 | GLSSGSVSTNY | 931 | YTNTR | 1057 | CALYLGRGI | 1444 |
| | | | | NYA | | MDVW | | YPS | | SS | | WVF | |
| VLL2A | * | YTFTSYGIS | 300 | GWISAYNGNT | 477 | CASSKEKATYYYG | 860 | GLSSGSVSTNY | 931 | YTNTR | 1057 | CLAYLGRGI | 1445 |
| | | | | NYA | | MDVW | | YPS | | SS | | WVF | |
| VLY3A | * | YTFTSYGIS | 300 | GWISAYNGNT | 477 | CASSKEKATYYYG | 860 | GLSSGSVSTNY | 931 | YTNTR | 1057 | CLLALGRGI | 1446 |
| | | | | NYA | | MDVW | | YPS | | SS | | WVF | |
| VLL4A | * | YTFTSYGIS | 300 | GWISAYNGNT | 477 | CASSKEKATYYYG | 860 | GLSSGSVSTNY | 931 | YTNTR | 1057 | CLLYAGRGI | 1447 |
| | | | | NYA | | MDVW | | YPS | | SS | | WVF | |
| VLG5A | * | YTFTSYGIS | 300 | GWISAYNGNT | 477 | CASSKEKATYYYG | 860 | GLSSGSVSTNY | 931 | YTNTR | 1057 | CLLYLARGI | 1448 |
| | | | | NYA | | MDVW | | YPS | | SS | | WVF | |
| VLR6A | * | YTFTSYGIS | 300 | GWISAYNGNT | 477 | CASSKEKATYYYG | 860 | GLSSGSVSTNY | 931 | YTNTR | 1057 | CLLYLGAGI | 1449 |
| | | | | NYA | | MDVW | | YPS | | SS | | WVF | |
| VLG7A | * | YTFTSYGIS | 300 | GWISAYNGNT | 477 | CASSKEKATYYYG | 860 | GLSSGSVSTNY | 931 | YTNTR | 1057 | CLLYLGRAI | 1450 |
| | | | | NYA | | MDVW | | YPS | | SS | | WVF | |
| VLI8A | * | YTFTSYGIS | 300 | GWISAYNGNT | 477 | CASSKEKATYYYG | 860 | GLSSGSVSTNY | 931 | YTNTR | 1057 | CLLYLGRG | 1451 |
| | | | | NYA | | MDVW | | YPS | | SS | | AWVF | |
| VLW9A | ** | YTFTSYGIS | 300 | GWISAYNGNT | 477 | CASSKEKATYYYG | 860 | GLSSGSVSTNY | 931 | YTNTR | 1057 | CLLYLGRGI | 1452 |
| | | | | NYA | | MDVW | | YPS | | SS | | AVF | |
| VLV10A | * | YTFTSYGIS | 300 | GWISAYNGNT | 477 | CASSKEKATYYYG | 860 | GLSSGSVSTNY | 931 | YTNTR | 1057 | CLLYLGRGI | 1453 |
| | | | | NYA | | MDVW | | YPS | | SS | | WAF | |
| VHK2A | * | YTFTSYGIS | 300 | GWISAYNGNT | 477 | CASSAEKATYYYG | 1436 | GLSSGSVSTNY | 931 | YTNTR | 1057 | CLLYLGRGI | 1165 |
| | | | | NYA | | MDVW | | YPS | | SS | | WVF | |
| VHK4A | * | YTFTSYGIS | 300 | GWISAYNGNT | 477 | CASSKEAATYYYG | 1437 | GLSSGSVSTNY | 931 | YTNTR | 1057 | CLLYLGRGI | 1165 |
| | | | | NYA | | MDVW | | YPS | | SS | | WVF | |
| VHT6A | ** | YTFTSYGIS | 300 | GWISAYNGNT | 477 | CASSKEKAAYYYG | 1438 | GLSSGSVSTNY | 931 | YTNTR | 1057 | CLLYLGRGI | 1165 |
| | | | | NYA | | MDVW | | YPS | | SS | | WVF | |
| VHY7A | ** | YTFTSYGIS | 300 | GWISAYNGNT | 477 | CASSKEKATAYYG | 1439 | GLSSGSVSTNY | 931 | YTNTR | 1057 | CLLYLGRGI | 1165 |
| | | | | NYA | | MDVW | | YPS | | SS | | WVF | |
| VHY8A | n.b. | YTFTSYGIS | 300 | GWISAYNGNT | 477 | CASSKEKATYAYG | 1440 | GLSSGSVSTNY | 931 | YTNTR | 1057 | CLLYLGRGI | 1165 |
| | | | | NYA | | MDVW | | YPS | | SS | | WVF | |
| VHY9A | ** | YTFTSYGIS | 300 | GWISAYNGNT | 477 | CASSKEKATYYAG | 1441 | GLSSGSVSTNY | 931 | YTNTR | 1057 | CLLYLGRGI | 1165 |
| | | | | NYA | | MDVW | | YPS | | SS | | WVF | |
| VHG10A | * | YTFTSYGIS | 300 | GWISAYNGNT | 477 | CASSKEKATYYYA | 1442 | GLSSGSVSTNY | 931 | YTNTR | 1057 | CLLYLGRGI | 1165 |
| | | | | NYA | | MDVW | | YPS | | SS | | WVF | |
| VHV13A | * | YTFTSYGIS | 300 | GWISAYNGNT | 477 | CASSKEKATYYYG | 1443 | GLSSGSVSTNY | 931 | YTNTR | 1057 | CLLYLGRGI | 1165 |
| | | | | NYA | | MDAW | | YPS | | SS | | WVF | |

* Indicates ≤ 100;
** indicates > 100
(n.b. indicates no binding observed).

### Example 3

### Crystal Structures of Anti-Fzd Antibody Fragments Bound to Fzd Extra-Cellular Domains

[0245] Fzds are a class of GPCRs in which an extra-cellular Cys-rich domain (CRD) is connected to its 7-transmemberane helical domain and cytoplasmic tail through a linker region. Fzds have either one or two predicted -NxS/T-glycosylation motifs within their extra-cellular domain. To enable high-resolution structures, Fzds extra-cellular domains that contain two glycosylation motifs were truncated before second predicted -NxS/T-glycosylation motifs resulting constructs named CRD-Xtal. Sequence of each of 10 Fzd CRD-Xtal containing an eight-Histidine motif at their C-terminus are as follows:

hFzd1_Q9UP38_101-230
(SEQ ID NO: 1454)
QYNGERGISVPDHGYCQPISIPLCTDIAYNQTIMPNLLGHTNQEDAGLEV
HQFYPLVKVQCSAELKFFLCSMYAPVCTVLEQALPPCRSLCERARQGCEA
LMNKFGFQWPDTLKCEKFPVHGAGELCVGQGSHHHHHHHH
hFzd2_Q14332_24-153
(SEQ ID NO: 1455)
QFHGEKGISIPDHGFCQPISIPLCTDIAYNQTIMPNLLGHTNQEDAGLEV
HQFYPLVKVQCSPELRFFLCSMYAPVCTVLEQAIPPCRSICERARQGCEA
LMNKFGFQWPERLRCEHFPRHGAEQICVGQHHHHHHHH
hFzd3_Q9NPG1_23-148
(SEQ ID NO: 1456)
HSLFSCEPITLRMCQDLPYNTTFMPNLLNHYDQQTAALAMEPFHPMVNLD
CSRDFRPFLCALYAPICMEYGRVTLPCRRLCQRAYSECSKLMEMFGVPWP
EDMECSRFPDCDEPYPRLVDLNLAGEHHHHHHHH
hFzd4_Q9ULV1_38-167
(SEQ ID NO: 1457)
GDEEERRCDPIRISMCQNLGYNVTKMPNLVGHELQTDAELQLTTFTPLIQ
YGCSSQLQFFLCSVYVPMCTEKINIPIGPCGGMCLSVKRRCEPVLKEFGF
AWPESLNCSKFPPQNDHNHMCMEGPGDEEVHHHHHHHH
hFzd5_Q13467_27-152
(SEQ ID NO: 1458)
ASKAPVCQEITVPMCRGIGYNLTHMPNQFNHDTQDEAGLEVHQFWPLVEI
QCSPDLRFFLCSMYTPICLPDYHKPLPPCRSVCERAKAGCSPLMRQYGFA
WPERMSCDRLPVLGRDAEVLCMDYNRHHHHHHHH
hFzd6_O60353_18-145
(SEQ ID NO: 1459)
HSLFTCEPITVPRCMKMAYNMTFFPNLMGHYDQSIAAVEMEHFLPLANLE
CSPNIETFLCKAFVPTCIEQIHVVPPCRKLCEKVYSDCKKLIDTFGIRWP
EELECDRLQYCDETVPVTFDPHTEFLGHHHHHHHH
hFzd7_O75084_36-165
(SEQ ID NO: 1460)
HGEKGISVPDHGFCQPISIPLCTDIAYNQTILPNLLGHTNQEDAGLEVHQ
FYPLVKVQCSPELRFFLCSMYAPVCTVLDQAIPPCRSLCERARQGCEALM
NKFGFQWPERLRCENFPVHGAGEICVGQNTHHHHHHHH
hFzd8_Q9H461_28-153
(SEQ ID NO: 1461)
ASAKELACQEITVPLCKGIGYNYTYMPNQFNHDTQDEAGLEVHQFWPLVE
IQCSPDLKFFLCSMYTPICLEDYKKPLPPCRSVCERAKAGCAPLMRQYGF
AWPDRMRCDRLPEQGNPDTLCMDYNRHHHHHHHH
hFzd9_O00144_23-159
(SEQ ID NO: 1462)
LEIGRFDPERGRGAAPCQAVEIPMCRGIGYNLTRMPNLLGHTSQGEAAAE
LAEFAPLVQYGCHSHLRFFLCSLYAPMCTDQVSTPIPACRPMCEQARLRC
APIMEQFNFGWPDSLDCARLPTRNDPHALCMEAPENAHHHHHHHH
hFzd10_Q9ULW2_21-154
(SEQ ID NO: 1463)
SSMDMERPGDGKCQPIEIPMCKDIGYNMTRMPNLMGHENQREAAIQLHEF
APLVEYGCHGHLRFFLCSLYAPMCTEQVSTPIPACRVMCEQARLKCSPIM
EQFNFKWPDSLDCRKLPNKNDPNYLCMEAPNNGHHHHHHHH

### Example 4

### Expression and Purification of Fzd CD_Xtal Constructs

[0246] FreeStyle™ 293-F Cells (Thermofisher) stably expressing all Fzd CRD_Xtal protein constructs were created using lenti-viral technology. For large-scale expression, a frozen vial FreeStyle™ 293-F Cells expressing Fzd CRD_Xtal was thawed into 20 mL of FreeStyle (Thermofisher) media in the presence of 10 U penicillin and 10 μg of streptomycin (Lonza) per mL. Cells were expended on alternative days, until density of ˜3.0×10⁶ cell/mL was reached at desired volumes, typically 6 to 10 L. At this stage, cells were allowed to grow continuously to higher density and, media was harvested by centrifugation at a viability of ˜70%. Fzd CRD_Xtal proteins were purified from media by incubation with Ni-NTA resin (1 mL per L of culture; Qiagen) pre-equilibrated in HBS (20 mM HEPES pH 7.4, 150 mM NaCl), and eluted with 500 mM imidazole in HBS. Ni-NTA eluates were concentrated to 5 mL, and further polished on a HiLoad 16/600 Superdex 200 pg column (GE Life Sciences) pre-equilibrated with HBS. Fractions near the main peak was further analyzed by SDS-Polyacrylamide Gel Electrophoresis (SDS-PAGE) to confirm the content. SDS-PAGE was performed using Tris-HCl 4-15% gel (Bio-Rad, Hercules, Calif.) under both reducing and non-reducing conditions. The samples were prepared in Laemmli sample buffer and heated at 100° C. for 5 min. Fractions containing Fzd CRD_Xtal were concentrated to ˜2 mg/mL and frozen in the presence of 10% glycerol for storage at −80C until further use. Protein concentrations were determined using a NanoDrop Spectrophotometer (Thermo Scientific) by the direct UV A280 method. The relationship of absorbance to protein concentration is linear based on Beer-Lamber equation, A=ε l c; A is the absorbance value, ε is the wavelength-dependent extinction coefficient, l is the path length in centimeters, and c is the protein concentration. The extinction coefficients of all produced proteins were estimated by their amino acid sequences.

### Example 5

### Expression and Purification of Fab Binders

[0247] Plasmids expressing light-chain and heavy-chain (with hexa-histidine tag at its C-terminus) of Fab binders of Fzd CRD_Xtal were co-transfected for co-expression in Expi293 cells, typically at 1000 mL scale, following the standard protocols from the manufacturer (Thermofisher). After 4 days of continuous cell growth, media were harvested by centrifugation, and bound to Complete-His resin (2.5 mL per 1 L culture; Roche) pre-equilibrated in PBS, and eluted under gravity-flow using 250 mM imidazole in PBS. Elutions containing Fab binders were concentrated to ˜5 mL, and further polished on a HiLoad 16/600 Superdex 200 pg column (GE Life Sciences) column pre-equilibrated with HBS. Fractions near main peak were further analyzed by SDS-Polyacrylamide Gel Electrophoresis (SDS-PAGE) to confirm the content. SDS-PAGE was performed using Tris-HCl 4-15% gel (Bio-Rad, Hercules, Calif.) under both reducing and non-reducing conditions. The samples were prepared in Laemmli sample buffer and heated at 100° C. for 5 min. Fractions containing Fzd CRD_Xtal were concentrated to ˜3 mg/mL and frozen in the presence of 10% glycerol for storage at ˜80° C. until further use. Protein concentrations were determined using a NanoDrop Spectrophotometer (Thermo Scientific) by the direct UV A280 method. The relationship of absorbance to protein concentration is linear based on Beer-Lamber equation, A=ε l c; A is the absorbance value, ε is the wavelength-dependent extinction coefficient, l is the path length in centimeters, and c is the protein concentration. The extinction coefficients of all produced proteins were estimated by their amino acid sequences.

### Example 6

### Fzd:Fab Complex Formation, Crystallization, and Structure Determination

[0248] Purified Fzd CRD_Xtal and Fab binders were mixed at 1.1:1 molar ratio (little excess of the smaller molecular weight protein), and incubated with carboxy-peptidase A and B at a w/w ratio of 100:1 for over-night at 4° C. Complex formation was confirmed by observation of a single-major peak on SuperdexS200 Increase (10/300 GL) column pre-equilibrated in HBS. Fractions containing complexes were further checked by SDS-PAGE, and concentrated to a range from 10 to 55 mg/mL for crystallization screens. Initial crystallization screen, using commercially available MCSG1, MCSG2, MCSG3, MCSG4, PACT (Molecular Dimensions), PEGs I, and PEGs II (Qiagen) screen, and optimization by grid-screens or microseed matrix screen [MMS; Microseed matrix screening for optimization in protein crystallization: what have we learned?

[0249] D'Arcy, A., Bergfors, T., Cowan-Jacob S. W., and Marshd, M. Acta Cryst. F70, 1117-1126 (2014)]. were performed using Mosquito (TTP LabTech) liquid handler, and equilibrated at 18° C. inside an EchoTherm incubator (Torrey Pines Scientific). 96-well plate crystal screening experiments were periodically monitored manually via a DiscoveryV20 stereomicroscope (Zeiss), and crystals were frozen for data collection by plunging into liquid nitrogen in the presence of various cryo-protectants (typically 15 to 30% v/v of glycerol or ethyleneglycol). X-ray diffraction datasets were collected at the Berkeley Center for Structural Biology at the Advanced Light Source (ALS), Berkeley Calif., and processed with XDS [Kabsch, W. XDS. Acta Cryst. D 66, 125-132 (2010)], and xdsme [Legrand, P. XDSME: XDS Made Easier (2017) GitHub repository, https://github.com/legrandp/xdsme DOI 10.5281/zenodo.837885]. programs. Structure of Fzd:Fab complexes were determined by molecular replacement method using Phaser with constant and variable domains of related Fabs are template [Phaser crystallographic software. A. J. McCoy, R. W. Grosse-Kunstleve, P. D. Adams, M. D. Winn, L. C. Storoni, and R. J. Read. J Appl Crystallogr 40, 658-674 (2007)], followed by refinement and validation by MolProbity as implemented in Phenix [PHENIX: a comprehensive Python-based system for macromolecular structure solution. P. D. Adams, P. V. Afonine, G. Bunkoczi, V. B. Chen, I. W. Davis, N. Echols, J. J. Headd, L. W. Hung, G. J. Kapral, R. W. Grosse-Kunstleve, A. J. McCoy, N. W. Moriarty, R. Oeffner, R. J. Read, D. C. Richardson, J. S. Richardson, T. C. Terwilliger, and P. H. Zwart. Acta Cryst. D66, 213-221 (2010); MolProbity: all-atom structure validation for macromolecular crystallography. V. B. Chen, W. B. Arendall, J. J. Headd, D. A. Keedy, R. M. Immormino, G. J. Kapral, L. W. Murray, J. S. Richardson, and D. C. Richardson. Acta Cryst. D 66, 12-21 (2010)]. Crystallography models were manually inspected and built using COOT [Features and development of Coot. P. Emsley, B. Lohkamp, W. G. Scott, and K. Cowtan. Acta Cryst. D 66, 486-501 (2010)]. Analyses of refined crystal structures, and image creations were performed using MOE (CCG) and PyMol (Schrodinger).

### Example 7

### Structure of Fzd1:1 RC07 Complex

[0250] Sequence of 1RC07 (001S-B03) Fab:

1RC07_Lchain
(SEQ ID NO: 1464)
SYVLTQPPSVSVSPGQTASITCSGDKVGHKYASVVYQQKPGQSPVLVIYE
DSQRPSGIPVRFSGSNSGNTATLTISGTQAMDEADYYCQAWDSSTDVVFG
GGTKLTVLGQPKAAPSVTLFPPSSEELQANKATLVCLISDFYPGAVTVAW
KADSSPVKAGVETTTPSKQSNNKYAASSYLSLTPEQWKSHRSYSCQVTHE
GSTVEKTVAPTECS
1RC07_Hchain
(SEQ ID NO: 1465)
QVQLQQWGAGLLKPSETLSLTCAVSGASFSGHYVVTWIRQPPGKGLEWIG
EIDHTGSTNYEPSLRSRVTISVDTSKNQFSLNLKSVTAADTAVYYCARGG
QGGYDWGHYHGLDVWGQGTTVTVSSASTKGPSVFPLAPSSKSTSGGTAAL
GCLVKDYFPEPVTVSWNSGALTSGVHTFPAVLQSSGLYSLSSVVTVPSSS
LGTQTYICNVNHKPSNTKVDKKVEPKSCGSGSGHHHHHH

[0251] Diffraction quality crystals of Fzd1:1RC07 complex (concentration=28 mg/mL) grew in a crystallization condition containing 0.1 M lithium chloride, 0.1 M HEPES: NaOH, pH 7.5, and 25% (w/v) PEG 6000. Crystal was cryo-protected using 20% glycerol in the well-solution. Fzd1:1RC07 complex crystallized in the P2₁2₁2 space group (a=65.79, b=192.21, c=44.79 Å) with one complex molecule per asymmetric unit. Structure of Fzd1: 1RC07 complex was determined at a resolution of 2.10 Å, and refined to R_{cryst} and R_{free} factors of 19.9% and 24.8%, respectively. In the crystal structure 101-114, 179-189, 203-207, and 217-230 stretch of residues of Fzd1 could not be modeled due to disordered electron density maps.

[0252] Overall structure of Fzd1:1RC07 complex is shown in FIG. 3.1 (A and B), which reveals that the heavy-chain CDR3 of 1RC07 binds closer to the lipid binding site as observed in the complex of Fzd8:Wnt8a complex [PDB Code: 4F0A; Janda, C. Y., Waghray, D., Levin, A. M., Thomas, C., Garcia, K. C. (2012) Science 337: 59-64]. During crystallographic model building a strong mFₒ-DF_{c} difference map electron density, at >10 was observed at the interface antigen Fzd1 and antibody 1RC07. This strong positive difference-density maps could satisfactorily be explained by modeling a Zinc ion, which was further confirmed by a strong anomalous difference map peak, at >15 calculated at 3.5 Å resolution FIG. 3.1 (C). This Zn2+ ion was bound by His107 (at 2.04 Å) and His109 (at 2.01 Å) from CDR H3-loop, and Glu49 (at 2.03 and 2.76 Å) of CDR L2-loop of 1RC07, and His151 (at 2.00 Å) of Fzd1 that is conserved in the sequences of Fzd2, Fzd7, Fzd5, Fzd8, and Fzd10.

[0253] Structure of the complex allow us to identify epitope of Fzd1 for 1RC07 with the following residue defining the core interaction-site on Fzd1 (5A cut-off):

[0254] Pro122, Leu148, His151, Gln152, Try154, Pro155, Leu156, Lys158, and Gln160.

[0255] In addition, following residues on Fzd1 could be identified as immediate-interaction site for 1RC07 (interaction distances >5.0 Å and <=8.0 Å):

[0256] Ser120, Ile121, Leu123, Cys124, Thr125, Asp126, Glu144, Gly147, Glu149, Val150, Phe153, Val157, Val159, Cys161, Cys198, Leu201, and Met202.

[0257] Structure of Fzd1:1RC07 complex also allow us to identify following residues on 1RC07 at less-than or equal to 5.0 Å from any atoms of Fzd1:

[0258] 1RC07 Heavy Chain:

[0259] Tyr103, Trp105, Gly106, His107, and His109.

[0260] 1RC07 Light Chain:

[0261] Val27, Gly28, His29, Lys30, Tyr31, Ala32, Tyr48, Glu49, Asp50, Ser51, Gln52, and Asn65.

[0262] Further, the structure of Fzd1:1RC07 complex reveals following residues on 1RC07 to be immediate-interaction site for Fzd1 with interaction distances >=5.0 Å and <=8.0 Å:

[0263] 1 RC07 Heavy Chain:

[0264] Gln100, Gly101, and Tyr108.

[0265] 1RC07 Light Chain:

[0266] Lsy26, Ser33, Ile47, Arg53, Val59, Ser62, Gly63, Ser64, Asn65, Ser66, Gly67, Thr69, Ala70, Trp90, and Ser92.

### Example 8

### Structure of Fzd1:R2M9 Complex

[0267] Sequence of R2M9 (003S-E07) Fab:

R2M9_Lchain
(SEQ ID NO: 1466)
DIQMTQSPSSLSASVGDRVTITCRASQSISSYLNVVYQQKPGKAPKLLI
YAASSLQSGVPSRFSGSGSGTDFTLTISSLQPEDFATYYCQQSYRTPFT
FGPGTKVDIKRTVAAPSVFIFPPSDEQLKSGTASVVCLLNNFYPREAKV
QWKVDNALQSGNSQESVTEQDSKDSTYSLSSTLTLSKADYEKHKVYACE
VTHQGLSSPVTKSFNRGEC
R2M9_Hchain
(SEQ ID NO: 1467)
QVQLVQSGAEVKKPGSSVKVSCKASGYTFTNNFMHVVVRQAPGQGLEVV
MGWINPNSGGTKYAQKFQGRVTITADESTSTAYMELSSLRSEDTAVYYC
ARSVGEVGATMLGIGVVVYWFDPWGQGTLVTVSSASTKGPSVFPLAPSS
KSTSGGTAALGCLVKDYFPEPVTVSWNSGALTSGVHTFPAVLQSSGLYS
LSSVVTVPSSSLGTQTYICNVNHKPSNTKVDKKVEPKSCGSGSGHHHHHH

[0268] Diffraction quality crystals of Fzd1:R2M9 complex (concentration=32 mg/mL) grew in a crystallization condition containing 0.1 M sodium formate, and 11% (w/v) PEG 3350. Crystal was cryo-protected using 26% glycerol in the well-solution. Fzd1:R2M9 complex crystallized in the P21 space group (a=50.57, b=160.60, c=88.97 Å, and β=95.5° with two complex molecules per asymmetric unit. Structure of Fzd1: R2M9 complex was determined at a resolution of 2.60 Å, and refined to R_{cryst} and R_{free} factors of 23.1% and 26.3%, respectively.

[0269] Overall structure of Fzd1: R2M9 complex is shown in FIG. 3.1 (A and B), which reveals that the R2M9 recognizes Fzd1 from a direction opposite to the lipid binding site as observed in the complex of Fzd8:Wnt8a complex [PDB Code: 4F0A; Janda, C. Y., Waghray, D., Levin, A. M., Thomas, C., Garcia, K. C. (2012) Science 337: 59-64]. Structure of the complex allow us to identify epitope of Fzd1 for R2M9 with the following residue defining the core interaction-site on Fzd1 (5A cut-off):

[0270] Tyr115, Ala128, Tyr129, Phe167, Val176, Thr178, Val179, Leu180, Glu181, Gln182, Leu184, Gly224, Leu226, Cys227, and Val228.

[0271] In addition, following residues on Fzd1 could be identified as immediate-interaction site for R2M9 (interaction distances >=5.0 Å and <=8.0 Å):

[0272] Cys116, Ile127, Asn130, Gln131, Ser171, Cys177, Ala183, Pro185, Cys187, His221, Ala223, Glu225, Gly229, and Gln230.

[0273] Crystal structure of Fzd1:R2M9 complex reveals that a molecule of glycerol, used as cryoprotectant during sample preparation, interacting with Ser95 of R2M9 CDR H3-loop is at distances less than 5 Å from Leu180, Gln182, Leu184, and Leu226 of Fzd1. Another glycerol molecule bound to Val108 of R2M9 CDR H3-loop is at distances less than 5 Å from Val176, Cys177, Thr178, and Val179 of Fzd1. It is possible to exploit these interactions towards structure-guided engineering of R2M9 to optimize its properties.

[0274] Structure of Fzd1: R2M9 complex also allow us to identify following residues on R2M9 at less-than or equal to 5.0 Å from any atoms of Fzd1:

[0275] R2M9 Heavy Chain:

[0276] Asn31, Phe33, His35, Trp50, Asn52, Lys58, Ser95, Gly97, Glu98, Val99, Leu104, Gly105, Ile106, Val108, and Tyr110.

[0277] R2M9 Light Chain:

[0278] Ser91, Tyr92, Arg93, Thr94 and Phe96.

[0279] Further, the structure of Fzd1: R2M9 complex reveals following residues on R2M9 to be immediate-interaction site for Fzd1 with interaction distances >5.0 Å and <=8.0 Å:

[0280] R2M9 Heavy Chain:

[0281] Thr30, Asn32, Met34, Trp47, Ile51, Asn53, Ser54, Gly56, Thr57, Tyr59, Val96, Gly100, Ala101, Thr102, Met103, Gly107, Trp109, Trp111, and Phe112.

[0282] R2M9 Light Chain:

[0283] Try32, Gln89, Gln90, and Pro95.

### Example 9

### Structure of Fzd4:003S-D10 Complex

[0284] Sequence of the 003S-D10 Fab:

003S-D10_Lchain
(SEQ ID NO: 1468)
DIQMTQSPSSLSASVGDRVTITCRASQGISSYLAVVYQQKPGKAPKLLIY
AASNLLGGVPSRFSGSGSGTDFTLTISSLQPEDFATYYCQQTYSTPWTFG
QGTKVEIKRTVAAPSVFIFPPSDEQLKSGTASVVCLLNNFYPREAKVQWK
VDNALQSGNSQESVTEQDSKDSTYSLSSTLTLSKADYEKHKVYACEVTHQ
GLSSPVTKSFNRGEC
003S-D10_Hchain
(SEQ ID NO: 1469)
EVQLVESGGGLVKPGGSLRLSCAASGFNFGIYSMTVVVRQAPGKGLEWIS
YISGDSGYTNYADSVKGRFTISRDDSKNTLYLQMNSLKTEDTAVYYCARV
GPGGWFDPWGQGTLVTVSSASTKGPSVFPLAPSSKSTSGGTAALGCLVKD
YFPEPVTVSWNSGALTSGVHTFPAVLQSSGLYSLSSVVTVPSSSLGTQTY
ICNVNHKPSNTKVDKKVEPKSCGSGSGHHHHHH

[0285] Diffraction quality crystals of Fzd4:003S-D10 (concentration=23 mg/mL) were obtained by MMS in MCSG1 screen, H4 condition containing 0.1 M Sodium Citrate: HCl, pH 5.6, 20% (v/v) PEG 4000, 20% (v/v) Isopropanol. Crystal was cryo-protected using 20% glycerol in well-solution. Fzd4:3SD10 crystallized in the P3121 space group (a=b=149.4 Å and c=91.9 Å) with one complex molecule per asymmetric unit. Structure of Fzd4:003S-D10 complex was determined at a resolution of 2.10 Å, and refined to R_{cryst} and R_{free} factors of 18.5% and 21.6%, respectively.

[0286] Overall structure of Fzd4:003S-D10 complex is show in FIG. 4.1(A), which reveals that the heavy-chain CDR3 of 003S-D10 binds at the lipid binding site (FIG. 4.1(B)) as observed in the complex of Fzd8:Wnt8a complex [PDB Code: 4F0A; Janda, C. Y., Waghray, D., Levin, A. M., Thomas, C., Garcia, K. C. (2012) Science 337: 59-64]. Structure of the complex allow us to identify epitope of Fzd4 for 003S-D10 with the following residue defining the core interaction-site on Fzd4 (5A cut-off) as show in FIG. 4.1(C), dark shaded:

[0287] Val67, Gly68, His69, Thr73, Asp74, Glu76, Leu77, Gln78, Thr80, Thr81, Phe82, Thr83, Pro84, Leu85, Gln87, Tyr88, Tyr102, Leu132, Phe135, Gly136, Phe137, Ala138, and Ser142.

[0288] In addition, following residues on Fzd4 could be identified as immediate-interaction site (interaction distances >=5.0 Å and <=8.0 Å; light-green surface in FIG. 4.1(C):

[0289] Ile50, Ser51, Met52, Pro64, Asn65, Leu66, Glu70, Leu71, Gln72, Ala75, Leu79, Ile86, Gly89, Leu94, Gln95, Leu98, Val101, Tyr102, Val131, Lys133, Glu134, Trp139, Pro140, Glu141, Leu143, and Lys147.

[0290] Structure of Fzd4: 003S-D10 also allow us to identify following residues on 003S-D10 at less-than or equal to 5.0 Å from any atoms of Fzd4:

[0291] 003S-D10 Heavy Chain:

[0292] Gly30, Ile31, Tyr32, Ser33, Tyr50, Ser52, Gly53, Asp54, Tyr57, Asn59, Arg98, Val99, Gly100, Pro101, Gly102, Gly103, Trp104, and Asp106.

[0293] 003S-D10 Light Chain:

[0294] Ser30, Tyr32, Leu46, Try49, Asn53, Leu55, Gly56, Thr91, Tyr92, Ser93, Thr94, and Trp96.

[0295] Further, the structure of Fzd4: 003S-D10 reveals following residues on 003S-D10 to be immediate-interaction site for Fzd4 with interaction distances >=5.0 Å and <=8.0 Å:

[0296] 003S-D10 Heavy Chain:

[0297] Val2, Phe27, Asn28, Phe29, Met34, Trp47, Ile51, Ser55, Gly56, Thr58, Tyr60, Arg72, Asp74, Phe105, and Pro107.

[0298] 003S-D10 Light Chain:

[0299] Ile2, Gln27, Gly28, Ile29, Ser31, Tyr36, Ile48, Ala50, Leu54, Ser67, Gln90, Pro95, and Thr97

### Example 10

### Structure of Fzd5:R2M3 Complex

[0300] Sequence of R2M3 (001S-A04) Fab:

>R2M3_Lchain
(SEQ ID NO: 1470)
QAVVLQEPSLSVSPGGTVTLTCGLSSGSVSTNYYPSVVYQQTPGQAPRTL
IYYTNTRSSDVPERFSGSIVGNKAALTITGAQPDDESVYFCLLYLGRGIV
VVFGGGTKLTVLGQPKAAPSVTLFPPSSEELQANKATLVCLISDFYPGAV
TVAWKADSSPVKAGVETTTPSKQSNNKYAASSYLSLTPEQWKSHRSYSCQ
VTHEGSTVEKTVAPTECS
>R2M3_Hchain
(SEQ ID NO: 1471)
EVQLVQSGAEVKKPGASVKVSCKASGYTFTSYGISVVVRQAPGQGLEVVM
GWISAYNGNTNYAQKLQGRVTMTTDTSTSTAYMELRSLRSDDTAVYYCAS
SKEKATYYYGMDVWGQGTTVTVSSASTKGPSVFPLAPSSKSTSGGTAALG
CLVKDYFPEPVTVSWNSGALTSGVHTFPAVLQSSGLYSLSSVVTVPSSSL
GTQTYICNVNHKPSNTKVDKKVEPKSCGSGSGHHHHHH

[0301] Diffraction quality crystals of Fzd5:R2M3 complex (concentration=28 mg/mL) grew in a crystallization condition containing 0.1 M lithium chloride, 0.1 M HEPES: NaOH, pH 7.5, and 25% (w/v) PEG 6000. Crystal was cryo-protected using 20% glycerol in the well-solution. Fzd5:R2M3 complex crystallized in the P2₁2₁2₁ space group (a=59.61 Å, b=69.29 Å, c=284.54 Å) with two complex molecules per asymmetric unit. Structure of Fzd5:R2M3 complex was determined at a resolution of 2.0 Å, and refined to R_{cryst} and R_{free} factors of 21.9% and 23.8%, respectively.

[0302] Overall structure of Fzd5:R2M3 complex is shown in FIG. 3.4 (A and B), which reveals that the R2M3 binds closer to the lipid binding site as observed in the complex of Fzd8:Wnt8a complex [PDB Code: 4F0A; Janda, C. Y., Waghray, D., Levin, A. M., Thomas, C., Garcia, K. C. (2012) Science 337: 59-64]. R2M3 binds to both Fzd 1, 2, 7 and Fzd 5,8 subfamilies of Fzds with wider specificity.

[0303] Structure of the complex allow us to identify epitope of Fzd5 for R2M3 with the following residue defining the core interaction-site on Fzd5 (5A cut-off):

[0304] Thr37, Val38, Pro39, Arg42, Asn56, His57, Asp58, Gln60, Asp61, Glu62, Gly64, Leu65, Glu66, His68, Gln69, Trp71, Pro72, Try123, and Gly124.

[0305] In addition, following residues on Fzd5 could be identified as immediate-interaction site for R2M3 (interaction distances >5.0 Å and <=8.0 Å):

[0306] Gln34, Glu35, Ile36, Met40, Cys41, Pro52, Asn53, Phe55, Thr59, Ala63, Val67, Phe70, Glu75, Tyr90, Met120, Arg121, Gln122, Phe125, Ala126, Pro128, and Glu129.

[0307] Structure of Fzd5:R2M3 complex also allow us to identify following residues on R2M3 at less-than or equal to 5.0 Å from any atoms of Fzd5:

[0308] R2M3 heavy chain: Ser31, Trp50, Tyr54, Asn55, Asn57, Lys102, Ile103, Thr104, Tyr105, and Tyr106.

[0309] R2M3 light chain: Thr31, Asn32, Tyr34, Tyr52, Asn54, Thr55, Tyr93, Gly95, Arg96, Gly97, and Trp99.

[0310] Further, the structure of Fzd5:R2M3 complex reveals following residues on R2M3 to be immediate-interaction site for Fzd5 with interaction distances >5.0 Å and <=8.0 Å:

[0311] R2M3 heavy chain: Phe29, Thr30, Tyr32, Gly33, Ile51, Ser52, Gly56, Thr58, Asn59, Glu101, Tyr107, and Gly108.

[0312] R2M3 light chain: Ser30, Tyr33, Pro35, Tyr51, Thr53, Gly66, Ser67, Ile68, Leu94, and Ile98.

### Example 11

### Structure of Fzd8:005S-H05 Complex

[0313] Sequence of 005S-H05 Fab:

>005S-H05_Lchain
(SEQ ID NO: 1472)
DIQMTQSPSSLSASVGDRVTITCRASQGISSALAVVYQQKPGKAPKLLI
YAASSLQSGVPSRFSGSGSGTDFTLTISSLQPEDFATYYCQQTYSMPIT
FGQGTRLEIKRTVAAPSVFIFPPSDEQLKSGTASVVCLLNNFYPREAKV
QWKVDNALQSGNSQESVTEQDSKDSTYSLSSTLTLSKADYEKHKVYACE
VTHQGLSSPVTKSFNRGEC
>005S-H05_Hchain
(SEQ ID NO: 1473)
QVQLVQSGAEVKKPGASVKVSCKASGYTFTSYYMHVVVRQAPGQGLEVV
MGRINPNSGGTNYAQKFQGRVTMTRDTSTSTVYMELSSLRSEDTAVYYC
ARVPDFWSGYLDYWGQGTLVTVSSASTKGPSVFPLAPSSKSTSGGTAAL
GCLVKDYFPEPVTVSWNSGALTSGVHTFPAVLQSSGLYSLSSVVTVPSS
SLGTQTYICNVNHKPSNTKVDKKVEPKSCGSGSGHHHHHH

[0314] Diffraction quality crystals of Fzd8: 005S-H05 complex (concentration=38 mg/mL) grew in a crystallization condition containing 0.2 M ammonium sulfate, 0.1 M HEPES: NaOH, pH 7.5, and 25% (w/v) PEG3350 Crystal was cryo-protected using 26% glycerol in the well-solution. Fzd8: 005S-H05 complex crystallized in the C2 space group (a=92.63 Å, b=60.38 Å, c=110.35 Å; β=97.5° with two complex molecules per asymmetric unit. Structure of Fzd8: 005S-H05 complex was determined at a resolution of 1.65 Å, and refined to R_{cryst} and R_{free} factors of 16.8% and 18.6%, respectively.

[0315] Overall structure of Fzd8: 005S-H05 complex is shown in FIG. 3.5 (A and B), which reveals that the Heavy-chain CDR3 of 005S-H05 inserts into the lipid binding site as observed in the complex of Fzd8:Wnt8a complex [PDB Code: 4F0A; Janda, C. Y., Waghray, D., Levin, A. M., Thomas, C., Garcia, K. C. (2012) Science 337: 59-64]. 005S-H05 binds to both Fzd 5 and Fzd 8 with subfamily specificity.

[0316] Structure of the complex allow us to identify epitope of Fzd8 for 005S-H05 with the following residue defining the core interaction-site on Fzd8 (5A cut-off):

[0317] Phe57, Asn58, Glu64, Leu67, Glu68, His70, Gln71, Phe72, Trp73, Pro74, Glu77, Try92, Arg123, Gln124, Try125, Gly126, Phe127, Ala128, Trp129, Pro130, Arg132, and Met133.

[0318] In addition, following residues on Fzd8 could be identified as immediate-interaction site for 005S-H05 (interaction distances >5.0 Å and <=8.0 Å):

[0319] Asn55, Gln56, His59, Asp60, Gly66, Val69, Leu75, Ile78, Leu88, Leu121, Met122, Asp131, and Arg137.

[0320] Structure of Fzd8: 005S-H05 complex also allow us to identify following residues on 005S-H05 at less-than or equal to 5.0 Å from any atoms of Fzd8:

[0321] 005S-H05 heavy chain: Gly26, Try27, Thr28, Ser31, Tyr32, Pro100, Asp101, Phe102, Trp103, Ser104, Gly105, Tyr106, and Asp108.

[0322] 005S-H05 light chain: Ile29, Ser30, Ser31, Ala32, Tyr49, Ala50, Ser52, Ser53, Leu54, Gln55, Ser56, Thr91, Tyr92, and Ser93.

[0323] Further, the structure of Fzd8: 005S-H05 complex reveals following residues on R2M3 to be immediate-interaction site for Fzd5 with interaction distances >5.0 Å and <=8.0 Å:

[0324] 005S-H05 heavy chain: Gln1, Val2, Phe29, Thr30, Tyr33, Arg50, Asn52, Asn54, Arg98, Val99, Leu107, and Tyr109.

[0325] 005S-H05 light chain: Ile2, Gly28, Leu33, Ala34, Leu46, Ala51, Gly57, Gly66, Ser67, Gly68, Phe71, Gln90, and Met94.

### Example 12

### Structure of Fzd5:004S-E05 Complex

[0326] Sequence of 004S-E05 Fab:

>004S-E05_Lchain
(SEQ ID NO: 1474)
DIQMTQSPSSLSASVGDRVTITCRASQGISSALAVVYQQKPGKAPKLLI
YAASALQSGVPSRFSGSGSGTDFTLTISSLQPEDFATYYCQQTYSTPRT
FGPGTKVDIKRTVAAPSVFIFPPSDEQLKSGTASVVCLLNNFYPREAKV
QWKVDNALQSGNSQESVTEQDSKDSTYSLSSTLTLSKADYEKHKVYACE
VTHQGLSSPVTKSFNRGEC
>004S-E05_Hchian
(SEQ ID NO: 1475)
EVQLVESGGGLVQPGGSLRLSCAASGFTFSTYEMNVVVRQAPGKGLEVV
VSGVSWNGSRTHYVDSVKGRFTISRDNSKNTLYLQLNSLRAEDTAVYYC
ARGQSEKVVWSGLYGMDVWGQGTTVWSSASTKGPSVFPLAPSSKSTSGG
TAALGCLVKDYFPEPVTVSWNSGALTSGVHTFPAVLQSSGLYSLSSVVT
VPSSSLGTQTYICNVNHKPSNTKVDKKVEPKSCGSGSGHHHHHH

[0327] Diffraction quality crystals of Fzd5: 004S-E05 complex (concentration=30 mg/mL) grew in a crystallization condition containing 0.1 M Bis-Tris pH 5.7, and 24% (w/v) PEG3350. Crystal was cryo-protected using 33% ethyleneglycol in the well-solution. Fzd5: 004S-E05 complex crystallized in the P2₁2₁2 space group (a=72.87 Å, b=192.35 Å, c=90.25 Å) with two complex molecules per asymmetric unit. Structure of Fzd5: 004S-E05 complex was determined at a resolution of 1.70 Å, and refined to R_{cryst} and R_{free} factors of 18.5% and 20.7%, respectively.

[0328] Overall structure of Fzd5: 004S-E05 complex is shown in FIG. 3.4 (A and B), which reveals that the CDR-H3 of 004S-E05 binds at the lipid binding site as observed in the complex of Fzd8:Wnt8a complex [PDB Code: 4F0A; Janda, C. Y., Waghray, D., Levin, A. M., Thomas, C., Garcia, K. C. (2012) Science 337: 59-64]. 004S-E050 binds to both Fzd 5 and Fzd 8 with bias towards the former. An ethyleneglycol, used as a cryoprotectant, bound Glu75 of Fzd5 interacts with Ala50, and Ala53 of the light-chain of 004S-E05.

[0329] Structure of the complex allow us to identify epitope of Fzd5 for 004S-E05 with the following residue defining the core interaction-site on Fzd5 (5A cut-off):

[0330] Gln69, Phe70, Trp71, Pro72, Leu73, Glu75, Ile76, Gln77, Cys78, Gly115, Pro118, Leu119, Met120, Arg121, Gln122, Try123, Gly124, and Phe125.

[0331] In addition, following residues on Fzd5 could be identified as immediate-interaction site for 004S-E05 (interaction distances >5.0 Å and <=8.0 Å):

[0332] Leu65, Glu66, Val67, His68, Val74, Ser79, Leu82, Cys116, Ser117, Ala126, and Pro128.

[0333] Structure of Fzd5: 004S-E05 complex also allow us to identify following residues on 004S-E05 at less-than or equal to 5.0 Å from any atoms of Fzd5:

[0334] 004S-E05 heavy chain: Arg57, His59, Ser101, Trp104, Tryp105, Ser106, Gly107, Leu108, and Tyr109.

[0335] 004S-E05 light chain: Ser30, Ser31, Ala32, Try49, Ala50, Ala53, Ser67, Thr91, Tyr92, Ser93, Thr94, and Arg96.

[0336] Further, the structure of Fzd5: 004S-E05 complex reveals following residues on R2M3 to be immediate-interaction site for Fzd5 with interaction distances >5.0 Å and <=8.0 Å:

[0337] 004S-E05 heavy chain: Glu33, Ser52, Trp53, Ser56, His59, Gln100, Glu102, Lys103, and Gly110.

[0338] 004S-E05 light chain: Ile2, Gln27, Gly28, Ile29, Leu33, Tyr49, Ala51, Ser52, Leu54, Gly66, Gly68, Phe71, Gln89, Gln90, Pro95, and Arg96.

### Example 13

### Structure of Fzd5:4A12 Complex

[0339] Sequence of 4A12 Fab:

>4Al2_Lchain
(SEQ ID NO: 1476)
DIVMTQSHKFMSTSVGDRVSITCKASQDVGTAVAVVYQQKPGQSPKLLIY
WASTRHTGVPDRFTGSGSGTDFTLTINNVQSEDLADYFCQQYSTYPLTFG
AGTKLELKRTVAAPSVFIFPPSDEQLKSGTASVVCLLNNFYPREAKVQWK
VDNALQSGNSQESVTEQDSKDSTYSLSSTLTLSKADYEKHKVYACEVTHQ
GLSSPVTKSFNRGEC
>4Al2_Hchain
(SEQ ID NO: 1477)
QVQLQQSGPELVKPGASVKLSCKASGYTFTNYDINVVVKQRPGQGLEWIG
WIYPRDGSTKYNEKFKGKATLTVDTSSSTAYMELHSLTSEDSAVYFCVRS
AWGFAYWGQGTLVTVSAASTKGPSVFPLAPSSKSTSGGTAALGCLVKDYF
PEPVTVSWNSGALTSGVHTFPAVLQSSGLYSLSSVVTVPSSSLGTQTYIC
NVNHKPSNTKVDKKVEPKSCGSGSGHHHHHH

[0340] Diffraction quality crystals of Fzd5:4A12 complex (concentration=10 mg/mL), obtained by MMS, grew in a crystallization condition containing 0.2 M sodium chloride, 0.1 M Na2HPO4: Citric Acid, pH 4.2, and 20% (w/v) PEG8000. Crystal was cryo-protected using 25% ethyleneglycol in the well-solution. Fzd5:4A12 complex crystallized in the C2 space group (a=93.84 Å, b=60.07 Å, c=110.80 Å; β=104.7°) with two complex molecules per asymmetric unit. Structure of Fzd5:4A12 complex was determined at a resolution of 1.75 Å, and refined to R_{cryst} and R_{free} factors of 17.7% and 21.6%, respectively.

[0341] Overall structure of Fzd5:4A12 complex is shown in FIG. 3.4 (A and B), which reveals that the 4A12 binds opposite to the lipid binding site as observed in the complex of Fzd8:Wnt8a complex [PDB Code: 4F0A; Janda, C. Y., Waghray, D., Levin, A. M., Thomas, C., Garcia, K. C. (2012) Science 337: 59-64], and recognizes the c-terminal region of Fzd5. Electron density maps revealed a chloride ion, bound at the interface of Fzd5:4A12 complex, bound to Arg111 of Fzd5 also interacting with the main-chain amide-nitrogen of Thr28 and the side-chain amide group of Asn31 of the heavy-chain of 4A12.

[0342] Structure of the complex allow us to identify epitope of Fzd5 for 4A12 with the following residue defining the core interaction-site on Fzd5 (5A cut-off):

[0343] Cys105, Arg106, Ser107, Glu110, Arg111, Cys133, Asp134, Val138, Leu139, Gly140, Arg141, Asp142, Ala143, Val145, Leu146, Cys147, and Asp149.

[0344] In addition, following residues on Fzd5 could be identified as immediate-interaction site for 4A12 (interaction distances >5.0 Å and <=8.0 Å):

[0345] Asp81, Tyr98, Leu102, Pro103, Val108, Cys109, Ala112, Ala114, Ser132, Arg135, Leu136, Pro137, Glu144, and Met148.

[0346] Structure of Fzd5:4A12 complex also allow us to identify following residues on 4A12 at less-than or equal to 5.0 Å from any atoms of Fzd5:

[0347] 4A12 heavy chain: Asn31, Tyr32, Asp33, Trp50, Tyr52, Arg54, Ser99, Ala100, and Trp101.

[0348] 4A12 light chain: Ala32, Trp50, Tyr91, Ser92, and Tyr94.

[0349] Further, the structure of Fzd5:4A12 complex reveals following residues on 4A12 to be immediate-interaction site for Fzd5 with interaction distances >5.0 Å and <=8.0 Å:

[0350] 4A12 heavy chain: Gly26, Tyr27, Thr28, Thr30, Ile34, Asp35, Trp47,Ile51, Pro53, Asp55, Ser57, Thr58, Lys59, Arg98, Gly102, Phe103, Ala104, and Tyr105.

[0351] 4A12 light chain: Val29, Thr31, Tyr49, Gln89, Gln90, Thr93, and Leu96.

### Example 14

### Structure of Fzd9: 014S-B06 Complex

[0352] Sequence of 014S-B06 Fab:

014S-B06_Lchain
(SEQ ID NO: 1478)
DIQMTQSPSSLSASVGDRVTITCRASQSISSYLNVVYQQKPGKAPKLLI
YAASSLQSGVPSRFSGSGSGTDFTLTISSLQPEDFATYYCQQSYSTPLT
FGGGTKVEIKRTVAAPSVFIFPPSDEQLKSGTASVVCLLNNFYPREAKV
QWKVDNALQSGNSQESVTEQDSKDSTYSLSSTLTLSKADYEKHKVYACE
VTHQGLSSPVTKSFNRGEC
014S-B06_Hchain
(SEQ ID NO: 1479)
EVQLVQSGGGLVKPGGSLRLSCAASGFTFSSYSMNVVVRQAPGKGLEVV
VSYIENDGSITTYADSVKGRFTISRDDSKNTLYLQMNSLKTEDTAVYYC
ARAPYYYGSGSLFRLDYWGQGTLVTVSSASTKGPSVFPLAPSSKSTSGG
TAALGCLVKDYFPEPVTVSWNSGALTSGVHTFPAVLQSSGLYSLSSVVT
VPSSSLGTQTYICNVNHKPSNTKVDKKVEPKSCGSGSGHHHHHH

[0353] Diffraction quality crystals of Fzd9: 014S-B06 complex (concentration=31 mg/mL) grew in a crystallization condition containing 4% PEG 3350, 0.1M HEPES pH 7.5, and 0.2M lithium chloride. Crystal was cryo-protected using 27% glycerol in the well-solution. Fzd9: 014S-B06 crystallized in the P2₁2₁21 space group (a=63.8 Å, b=81.4 Å, and c=160.5 Å) with one complex molecule per asymmetric unit. Structure of Fzd9: 014S-B06 complex was determined at a resolution of 1.95 Å, and refined to R_{cryst} and R_{free} factors of 19.8% and 22.6%, respectively.

[0354] Overall structure of Fzd9: 014S-B06 complex is shown in FIG. 3.7 (A and B), which reveals that the heavy-chain CDR3 of 014S-B06 binds away from the lipid binding site as observed in the complex of Fzd8:Wnt8a complex [PDB Code: 4F0A; Janda, C. Y., Waghray, D., Levin, A. M., Thomas, C., Garcia, K. C. (2012) Science 337: 59-64], and recognize the region closer to the C-terminus of Fzd9.

[0355] Structure of the complex allow us to identify epitope of Fzd9 for 014S-B06 with the following residue defining the core interaction-site on Fzd9 (5A cut-off):

[0356] Leu60, Leu61, Lue95, Thr106, Pro107, Pro109, Arg112, Arg119, Asp135, Ser136, Leu137, Asp138, Ala140, Arg141, Leu142, Pro143, Thr144, Asp147, Pro148, His149, and Ala150.

[0357] In addition, following residues on Fzd9 could be identified as immediate-interaction site for 014S-B06 (interaction distances >=5.0 Å and <=8.0 Å):

[0358] Asn59, Gly62, Phe91, Ser94, Pro98, Ser105, Ile108, Ala110, Trp133, Pro134, Asp138, Cys139, Arg145, Asn146, Leu151, and Cys152.

[0359] Structure of Fzd9: 014S-B06 complex also allow us to identify following residues on 3SD10 at less-than or equal to 5.0 Å from any atoms of Fzd4:

[0360] 014S-B06 heavy chain:

[0361] Thr28, Ser30, Ser31, Tyr32, Asn53, Tyr101, Tyr102, Try103,

[0362] Gly104, Ser105, Leu108, and Arg110.

[0363] 014S-B06 light chain:

[0364] Ser31, Try32, Try49, Ala50, Ser53, and Ser91.

[0365] Further, the structure of Fzd9: 014S-B06 complex reveals following residues on 014S-B06 to be immediate-interaction site for Fzd9 with interaction distances >=5.0 Å and <=8.0 Å:

[0366] 014S-B06 heavy chain:

[0367] Phe27, Phe29, Asp54, Arg72, Asp74, Asn77, Arg98, Ala99, Pro100, Gly106, Ser107, Phe109, and Asp112.

[0368] 014S-B06 light chain:

[0369] Ile29, Ser30, Leu33, Asn34, Ala51, Ser52, and Tyr92.

### Example 15

### Structure of Fzd10: 005S-A07 Complex

[0370] Sequence of 005S-A07 Fab:

005S-A07_Lchain
(SEQ ID NO: 1480)
EIVLTQSPATLSVSPGERATLSCRASQSVSRNLAVVYQQKPGQAPRLL
IYGASTRATGIPARFSGSGSGTEFTLTISSLQSEDFAVYYCQQRSNWP
ITFGQGTRLEIKRTVAAPSVFIFPPSDEQLKSGTASVVCLLNNFYPRE
AKVQWKVDNALQSGNSQESVTEQDSKDSTYSLSSTLTLSKADYEKHKV
YACEVTHQGLSSPVTKSFNRGEC
005S-A07_Hchain
(SEQ ID NO: 1481)
QVQLVQSGAEVKKPGSSVKVSCKASGFTFTGSAVQVVVRQAPGQGLEV
VVGGILPIYGTTKYAQKFQGRVTITADESTSTAYMELSSLRSEDTAVY
YCARGARLYGFDYWGQGTLVTVSSASTKGPSVFPLAPSSKSTSGGTAA
LGCLVKDYFPEPVTVSWNSGALTSGVHTFPAVLQSSGLYSLSSVVTVP
SSSLGTQTYICNVNHKPSNTKVDKKVEPKSCGSGSGHHHHHH

[0371] Diffraction quality crystals of Fzd10: 005S-A07 complex (concentration=37 mg/mL) grew in a crystallization condition containing 0.2 M ammonium sulfate, 0.1 M sodium citrate:HCl pH 5.6, and 25% (w/v) PEG 4000. Crystal was cryo-protected using 20% glycerol in the well-solution. Fzd10: 005S-A07 complex crystallized in the H32 space group (a=b=138.2 Å, and c=190.6 Å) with one complex molecule per asymmetric unit. Structure of Fzd10: 005S-A07 complex was determined at a resolution of 2.40 Å, and refined to R_{cryst} and R_{free} factors of 20.6% and 25.0%, respectively.

[0372] Overall structure of Fzd10: 005S-A07 complex FIG. 3.8 (A and B), reveals that the 005S-A07 binds to Fzd10 at the lipid binding site as observed in the complex of Fzd8:Wnt8a complex [PDB Code: 4F0A; Janda, C. Y., Waghray, D., Levin, A. M., Thomas, C., Garcia, K. C. (2012) Science 337: 59-64]. Interestingly, crystal structure of Fzd10: 005S-A07 showed potential binding sites for two sulfate-ions (SO42-) at the antigen-Fab interface, that could be helpful in further structure-guided engineering of 005S-A07 to optimize its properties. Structure of the complex allow us to identify epitope on Fzd10 for 005S-A07 with the following residue defining the core interaction-site on Fzd10 (5A cut-off):

[0373] Pro40, Met41, Ile66, Gln67, His69, Glu70, Phe71, Ala72, Pro73, Val75, Glu76, Tyr77, Arg84, Met121, Glu122, Gln123, Phe124, Asn125, Phe126, Lys127, Pro129, and Asp130.

[0374] In addition, following residues on Fzd10 could be identified as immediate-interaction site for 005S-A07 (interaction distances >=5.0 Å and <=8.0 Å):

[0375] Ile39, Cys42, Lys43, Arg62, Glu63, Ala65, Ile66, Leu68, Leu74, Gly78, Cys88, Tyr91, Ser118, Pro119, Ile120, Trp128, Ser131, and Leu132.

[0376] Structure of Fzd10: 005S-A07 complex also allow us to identify following residues on 005S-A07 at less-than or equal to 5.0 Å from any atoms of Fzd4:

[0377] 005S-A07 heavy chain:

[0378] Thr28, Thr30, Gly31, Ser32, Leu52,Ile54, Tyr55, Thr57, Lys59, Arg98, Ala100, Arg101, Leu102, Tyr103, Gly104, and Asp106.

[0379] 005S-A07 light chain:

[0380] Arg33, Asn34, Leu48, Tyr51, Gly52, Ala57, Thr58, and Trp96.

[0381] Further, the structure of Fzd10: 005S-A07 complex reveals following residues on 005S-A07 to be immediate-interaction site for Fzd9 with interaction distances >=5.0 Å and <=8.0 Å:

[0382] 005S-A07 heavy chain:

[0383] Phe27, Phe29, Ala33, Gln35, Pro53, Gly56, Thr58, Gly99, Phe105, and Tyr107.

[0384] 005S-A07 light chain:

[0385] Val31, Ser32, Leu35, Leu49,Ile50, Ala53, Thr55, Arg56, Gly59, Ile60, Arg93, Ser94, Asn95, and Ile98.

### Example 16

### Structure of Fzd10:005S-E12 Complex

[0386] Sequence of 005S-E12 Fab:

005S-E12_Lchain
(SEQ ID NO: 1482)
DIQMTQSPSSLSASVGDRVTITCRASQSVGRVVMAVVYQQKPGKAPKLLI
YAASSLQSGVPSRFSGSGSGTDFTLTISSLQPEDFATYYCQQANTFPFTF
GPGTKVDIKRTVAAPSVFIFPPSDEQLKSGTASVVCLLNNFYPREAKVQW
KVDNALQSGNSQESVTEQDSKDSTYSLSSTLTLSKADYEKHKVYACEVTH
QGLSSPVTKSFNRGEC
005S-E12_Hchain
(SEQ ID NO: 1483)
QVQLVQSGAEVKKPGASVKVSCKASGYIFTDYYMHVVVRQAPGQGLEVVM
GVIFPVYPTPDYAQKFQGRVTMTRDTSTSTVYMELSSLRSEDTAVYYCAR
GGSTGYYGMDVWGQGTTVTVSSASTKGPSVFPLAPSSKSTSGGTAALGCL
VKDYFPEPVTVSWNSGALTSGVHTFPAVLQSSGLYSLSSVVTVPSSSLGT
QTYICNVNHKPSNTKVDKKVEPKSCGSGSGHHHHHH

[0387] Diffraction quality crystals of Fzd10: 005S-E12 complex (concentration=34 mg/mL) were obtained by MSS in a crystallization condition containing 0.1 M Bis-Tris Propane: HCl, pH 7, and 2.5 M ammonium sulfate. Crystal was cryo-protected using 1.7M sodium malonate pH 7.0 in the well-solution. Fzd10: 005S-E12 complex crystallized in the P312 space group (a=b=90.4 Å, and c=185.1 Å) with one complex molecule per asymmetric unit. Structure of Fzd10: 005S-E12 complex was determined at a resolution of 2.50 Å, and refined to R_{cryst} and R_{free} factors of 20.1% and 24.4%, respectively.

[0388] Overall structure of Fzd10: 005S-E12 complex FIG. 3.9 (A and B), reveals that the 005S-E12 binds to Fzd10 adjacent to the lipid binding site as observed in the complex of Fzd8:Wnt8a complex [PDB Code: 4F0A; Janda, C. Y., Waghray, D., Levin, A. M., Thomas, C., Garcia, K. C. (2012) Science 337: 59-64], and recognize the tail and helix at the N-terminal region of Fzd10. Structure of the complex allow us to identify epitope on Fzd10 for 005S-E12 with the following residue defining the core interaction-site on Fzd10 (5A cut-off):

[0389] Ile37, Glu38, Ile39, Pro40, Met41, Cys42, Lys43, Asp44, Ile45, Gly46, Asn48, Gln61, Arg62, Glu63, Ala65, Ile66, Leu68, His69, Ala72, Pro73, Val75, Glu76, and Arg84.

[0390] In addition, following residues on Fzd10 could be identified as immediate-interaction site for 005S-E12 (interaction distances >=5.0 Å and <=8.0 Å):

[0391] Glu35, Pro36, Tyr47, Asn60, Gln61, Ala64, Gln67, Glu70, Phe71, Leu74, Tyr77, and Phe124.

[0392] Structure of Fzd10: 005S-E12 complex also allow us to identify following residues on 005S-E12 at less-than or equal to 5.0 Å from any atoms of Fzd4:

[0393] 005S-E12 heavy chain:

[0394] Tyr33, Phe52, Pro53, Val54, Tyr55, Thr57, Asp59, Gly100, Ser101, Thr102, Gly103, Tyr104, and Tyr105.

[0395] 005S-E12 light chain:

[0396] Ile2, Gln27, Ser28, Val29, Gly30, Arg31, Trp32, Ala50, Ala91, Asn92, Thr93, Phe94, and Phe96.

[0397] Further, the structure of Fzd10: 005S-E12 complex reveals following residues on 005S-E12 to be immediate-interaction site for Fzd9 with interaction distances >=5.0 Å and <=8.0 Å:

[0398] 005S-E12 heavy chain:

[0399] Thr30, Asp31, Tyr32, His35, Trp47, Val50, Ile51, Pro56, Pro58, Tyr60, Gln62, Arg72, Gly99, and Gly106.

[0400] 005S-E12 light chain:

[0401] Asp1, Ala25, Ser26, Met33, Tyr49, Ala51, Ser52, Ser53, Ser67,

[0402] Gly68, Thr69, Gln90, and Pro95.

### Example 17

### Structure of Fzd3:029S-E03 Complex

[0403] Sequence of 029S-E03 Fab:

>029S-E03_Lchain
(SEQ ID NO: 1484)
DIQMTQSPSSLSASVGDRVTITCRASQSISSYLNVVYQQKPGKAPKLLI
YAASSLQTGVPSRFSGSGSGTDFTLTISSLQPEDFATYYCQQSFRLPLT
FGQGTKVEIKRTVAAPSVFIFPPSDEQLKSGTASVVCLLNNFYPREAKV
QWKVDNALQSGNSQESVTEQDSKDSTYSLSSTLTLSKADYEKHKVYACE
VTHQGLSSPVTKSFNRGEC
>029S-E03_Hchain
(SEQ ID NO: 1485)
QVQLVQSGAEVKKPGASVKVSCKASGYTFTGYYMHVVVRQAPGQGLEVV
MGWINPNSGNTGYAQKFQGRVTMTRDTSTSTVYMELSSLRSEDTAVYYC
ARSYYGVIDAFDIWGQGTMVTVSSASTKGPSVFPLAPSSKSTSGGTAAL
GCLVKDYFPEPVTVSWNSGALTSGVHTFPAVLQSSGLYSLSSVVTVPSS
SLGTQTYICNVNHKPSNTKVDKKVEPKSCGSGSGHHHHHH

[0404] Diffraction quality crystals of Fzd3: 029S-E03 complex (concentration=25 mg/mL) grew in a crystallization condition containing 0.2 M Trimethylamine N-Oxide, 0.1 M Tris: HCl, pH 8.5, and 20% (w/v) PEG 2000 MME. Crystal was cryo-protected using 20% glycerol in the well-solution. Fzd3: 029S-E03 crystallized in the P21 space group (a=69.60 Å, b=145.50 Å, and c=104.31 Å; β=101.8°) with one complex molecule per asymmetric unit. Structure of Fzd3: 029S-E03 complex was determined at a resolution of 2.40 Å, and refinement is in progress with R_{cryst} and R_{free} factors of 24.4% and 31.8%, respectively.

[0405] 029S-E03 is a mono-specific binder of Fzd3, and does not show detectable binding to other Fzds. Overall structure of Fzd3: 029S-E03 complex is shown in FIG. 11 (A and B), which reveals that the heavy-chain CDR3 of 029S-E03 binds adjacent to the lipid binding site as observed in the complex of Fzd8:Wnt8a complex [PDB Code: 4F0A; Janda, C. Y., Waghray, D., Levin, A. M., Thomas, C., Garcia, K. C. (2012) Science 337: 59-64], and recognize the region closer to the N-terminus of Fzd3.

[0406] Structure of the complex allow us to identify epitope of Fzd3 for 029S-E03 with the following residue defining the core interaction-site on Fzd3 (5A cut-off):

[0407] Pro30, Ile31, Thr32, Leu33, Arg34, Gln37, Asp38, Leu39, Gln55, Gln66, Ala59, Leu60, Glu63, His66, and Asn70.

[0408] In addition, following residues on Fzd3 could be identified as immediate-interaction site for 029S-E03 (interaction distances >=5.0 Å and <=8.0 Å):

[0409] Gln29, Met35, Cys36, Pro40, Tyr41, Asn42, Thr43, Asp54, Thr57, Ala58, Ala61, Met62, Pro67, Val69, Leu71, Asp72, and Arg78.

[0410] Structure of Fzd3: 029S-E03 complex also allow us to identify following residues on 3SD10 at less-than or equal to 5.0 Å from any atoms of Fzd3:

[0411] 029S-E03 heavy chain: Tyr33, Trp50, Asn52, Ser55, Asn57, Gln62, Tyr101, Val103, Ile104, and Asp105.

[0412] 029S-E03 light chain: Ile2, Gln27, Ser28, Ser30, Tyr32, Ser91, Phe92, Arg93, and Leu94.

[0413] Further, the structure of Fzd3: 029S-E03 complex reveals following residues on 029S-E03 to be immediate-interaction site for Fzd3 with interaction distances >=5.0 Å and <=8.0 Å:

[0414] 029S-E03 heavy chain: Trp47, Ile51, Pro53, Asn54, Gly56, Thr58, Gly59, Tyr60, Gln65, Ser99, Tyr100, Gly102, and Ala06.

[0415] 029S-E03 light chain: Asp1, Ser26, Ile29, Ser31, Leu33, Asn34, Gly68, Gln90, Pro95, and Leu96.

TABLE 3
Summary of Binding Characteristics of Antigen Binding proteins as
determined by co-crystal structures

| Antigen | | | |
|---|---|---|---|
| Binding | | Interaction site on Fzd | Interaction site on Fzd |
| Protein | Antigen | (<5 angstroms) | (5-8 angstroms) |
| 1RC07 | Fzd1 | Pro122, Leu148, His151, | Ser120, Ile121, Leu123, Cys124, |
| (Binds to | | Gln152, Tyr154, Pro155, | Thr125, Asp126, Glu144, Gly147, |
| Fzd1, Fzd2, | | Leu156, Lys158, and Gln160. | Glu149, Val150, Phe153, Val157, |
| and Fzd7) | | | Val159, Cys161, Cys198, Leu201, |
| | | | and Met202. |
| | Fzd2 / | P45/P55, L71/L81, H74/84, | S43/S53, I44/I54, L46/56, C47/57, |
| | Fzd7 | Y77/87, P78/88, L79/89, | T48/58, D49/59, E67/77, G70/80, |
| | | K81/91, and Q83/93. | E72/82, V73/83, F76/86, V80/90, |
| | | | V82/92, C84/94, C121/131, |
| | | | L124/134, and M125/135. |
| R2M9 | Fzd1 | Tyr115, Ala128, Tyr129, | Cys116, Ile127, Asn130, Gln131, |
| (Binds to | | Phe167, Val176, Thr178, | Ser171, Cys177, Ala183, Pro185, |
| Fzd1, Fzd2, | | Val179, Leu180, Glu181, | Cys187, His221, Ala223, Glu225, |
| and Fzd7) | | Gln182, Leu184, Gly224, | Gly229, and Gln230. |
| | | Leu226, Cys227, and Val228. | |
| | Fzd2 / | F38/48, A51/61, Y52/62, | C39/49, I50/60, N53/63, Q54/64, |
| | Fzd7 | F90/100, V99/109, T101/111, | C100/110, A106/116, P108/118, |
| | | V102/112, L103/113, | C110/120, H144/154, A146/156, |
| | | E104/D114, Q105/115, | Q148/E158, G152/G162, and |
| | | I107/117, E147/G157, | Q153/163. |
| | | I149/159, C150/160, and | |
| | | V151/161. | |
| 003S-D10 | Fzd4 | Val67, Gly68, His69, Thr73, | Ile50, Ser51, Met52, Pro64, |
| (Binds only | | Asp74, Glu76, Leu77, Gln78, | Asn65, Leu66, Glu70, Leu71, |
| to Fzd4, | | Thr80, Thr81, Phe82, Thr83, | Gln72, Ala75, Leu79, Ile86, |
| mono4) | | Pro84, Leu85, Gln87, Tyr88, | Gly89, Leu94, Gln95, Leu98, |
| | | Tyr102, Leu132, Phe135, | Val101, Tyr102, Val131, Lys133, |
| | | Gly136, Phe137, Ala138, | Glu134, Trp139, Pro140, Glu141, |
| | | and Ser142. | Leu143, and Lys147. |
| R2M3 | Fzd5 | Thr37, Val38, Pro39, Arg42, | Gln34, Glu35, Ile36, Met40, |
| (Binds to | | Asn56, His57, Asp58, Gln60, | Cys41, Pro52, Asn53, Phe55, |
| Fzd1, Fzd2, | | Asp61, Glu62, Gly64, Leu65, | Thr59, Ala63, Val67, Phe70, |
| Fzd7, Fzd5, | | Glu66, His68, Gln69, Trp71, | Glu75, Tyr90, Met120, Arg121, |
| and Fzd8) | | Pro72, Tyr123, and Gly124 | Gln122, Phe125, Ala126, Pro128, |
| | | | and Glu129. |
| | Fzd8 / | T39/S120/43/53, | Q36/117/40/50, E37/P118/41/51, |
| | Fzd1 / | V40/I121/44/54, | I38/119/42/52, L42/125/46/56, |
| | Fzd2 / | P41/122/45/55, | C43/124/47/57, P54/136/58/68, |
| | Fzd7 | K44/T125/49, 59, | N55/136/59/69, F57/L137/60/70, |
| | | N58/G139/62/72, | T61/N142/65/75, A65/146/69/79, |
| | | H59/140/63/73, | V69/150/73/83, F72/153/76/86, |
| | | D60/T141/64/74, | E77/K158/81/91, |
| | | Q62/143/66/76, | Y92/173/96/106, |
| | | D63/E144/67/77, | M122/202/125/135, |
| | | E64/D145/68/78/, | R123/N203/126/136, |
| | | G66/147/70/80, | Q124/K204/127/137, |
| | | L67/148/71/81, | F127/207/130/140, |
| | | E68/149/72/82, | A128/Q208/131/141, |
| | | H70/151/74/84, | P130/210/133/143, and |
| | | Q71/152/75/85, | D131/211/E134/144 |
| | | W73/Y154/77/87, | |
| | | P74/155/78/88, | |
| | | Y125/F205/128/138, and | |
| | | G126/206/129/139, | |
| 005S-H05 | Fzd8 | Phe57, Asn58, Glu64, Leu67, | Asn55, Gln56, His59, Asp60, |
| (Binds to | | Glu68, His70, Gln71, Phe72, | Gly66, Val69, Leu75, Ile78, |
| Fzd5 and | | Trp73, Pro74, Glu77, Tyr92, | Leu88, Leu121, Met122, Asp131, |
| Fzd8 in | | Arg123, Gln124, Tyr125, | and Arg137. |
| biased | | Gly126, Phe127, Ala128, | |
| manner; also | | Trp129, Pro130, Arg132, and | |
| binds to | | Met133. | |
| Fzd1, Fzd2, | Fzd5 / | F55/L138/61/71, | N53/136/59/69, Q54/L137/60/70, |
| and Fzd7 | Fzd1 / | N56/G139/62/72, | H57/140/63/73, D58/T141/64/74, |
| | Fzd2 / | E62/D145/68/78/, | G64/147/70/80, V67/150/73/83, |
| | Fzd7 | E66/149/72/82, | L73/156/79/89, I76/V159/82/92, |
| | | H68/151/74/84, | L86/169/92/102, |
| | | Q69/152/75/85, | L119/201/124/134, |
| | | F70/153/76/86, | M120/202/125/135, |
| | | W71/Y154/77/87, | E129/D211/E134/144, and |
| | | P72/155/78/88, | R135/K217/H140/N150. |
| | | E75/K158/81/91, | |
| | | Y90/173/96/106, | |
| | | R121/N203/126/136, | |
| | | Q122/K204/127/137, | |
| | | Y123/F205/128/138, | |
| | | G124/206/129/139, | |
| | | F125/207/130/140, | |
| | | A126/Q208/131/141, | |
| | | W127/209/132/142, | |
| | | P128/210/133/143, | |
| | | R130/T211/R135/145, and | |
| | | M131/L212/136/146. | |
| 004S-E05 | Fzd5 | Gln69, Phe70, Trp71, Pro72, | Leu65, Glu66, Val67, His68, |
| (Binds | | Leu73, Glu75, Ile76, Gln77, | Val74, Ser79, Leu82, Cys116, |
| preferentially | | Cys78, Gly115, Pro118, | Ser117, Ala126, and Pro128. |
| to Fzd5) | | Leu119, Met120, Arg121, | |
| | | Gln122, Tyr123, Gly124, and | |
| | | Phe125. | |
| | Fzd8 | Q71, F72, W73, P74, L75, | L67, E68, V69, H70, V76, S81, |
| | | E77, I78, G117, P120, L121, | L84, C118, A119, A128, and |
| | | M122, R123, Q124, Y125 | P130. |
| | | G126, and F127. | |
| 4A12 | Fzd5 | Cys105, Arg106, Ser107, | Asp81, Tyr98, Leu102, Pro103, |
| (Binds only | | Glu110, Arg111, Cys133, | Val108, Cys109, Ala112, Ala114, |
| to Fzd5, | | Asp134, Val138, Leu139, | Ser132, Arg135, Leu136, Pro137, |
| mono5) | | Gly140, Arg141, Asp142, | Glu144, and Met148. |
| | | Ala143, Val145, Leu146, | |
| | | Cys147, and Asp149. | |
| 014S-B06 | Fzd9 | Leu60, Leu61, Lue95, Thr106, | Asn59, Gly62, Phe91, Ser94, |
| (Binds only | | Pro107, Pro109, Arg112, | Pro98, Ser105, Ile108, Ala110, |
| to Fzd9, | | Arg119, Asp135, Ser136, | Trp133, Pro134, Asp138, |
| mono9) | | Leu137, Asp138, Ala140, | Cys139, Arg145, Asn146, |
| | | Arg141, Leu142, Pro143, | Leu151, and Cys152. |
| | | Thr144, Asp147, Pro148, | |
| | | His149, and Ala150. | |
| 005S-A07 | Fzd10 | Pro40, Met41, Ile66, Gln67, | Ile39, Cys42, Lys43, Arg62, |
| (Binds to | | His69, Glu70, Phe71, Ala72, | Glu63, Ala65, Leu68, Leu74, |
| both Fzd9 | | Pro73, Val75, Glu76, Tyr77, | Gly78, Cys88, Tyr91, Ser118, |
| and Fzd10) | | Arg84, Met121, Glu122, | Pro119, Ile120, Trp128, Ser131, |
| | | Gln123, Phe124, Asn125, | and Leu132. |
| | | Phe126, Lys127, Pro129, and | |
| | | Asp130. | |
| | Fzd9 | P45, M46, A71, E72, A74, | I44, C47, R48, G67, E68, A70, |
| | | E75, F76, A77, P78, V80, | L73, L79, G83, C93, Y96, A123, |
| | | M126, E127, Q128, F129, | P124, I125, W133, S136, and |
| | | N130, F131, G132, P134, and | L138. |
| | | D135. | |
| 005S-E12 | Fzd10 | Ile37, Glu38, Ile39, Pro40, | Glu35, Pro36, Tyr47, Asn60, |
| (Binds only | | Met41, Cys42, Lys43, Asp44, | Gln61, Ala64, Gln67, Glu70, |
| to Fzd10, | | Ile45, Gly46, Asn48, Gln61, | Phe71, Leu74, Tyr77, and |
| mono10) | | Arg62, Glu63, Ala65, Ile66, | Phe124. |
| | | Leu68, His69, Ala72, Pro73, | |
| | | Val75, Glu76, and Arg84. | |
| 029S-E03 | Fzd3 | Pro30, Ile31, Thr32, Leu33, | Gln29, Met35, Cys36, Pro40, |
| (Binds only | | Arg34, Gln37, Asp38, Leu39, | Tyr41, Asn42, Thr43, Asp54, |
| to Fzd3, | | Gln55, Gln66, Ala59, Leu60, | Thr57, Ala58, Ala61, Met62, |
| mono3) | | Glu63, His66, and Asn70. | Pro67, Val69, Leu71, Asp72, and |
| | | | Arg78. |

[0416] The various embodiments described above can be combined to provide further embodiments. All of the U.S. patents, U.S. patent application publications, U.S. patent application, foreign patents, foreign patent application and non-patent publications referred to in this specification and/or listed in the Application Data Sheet are incorporated herein by reference, in their entirety. Aspects of the embodiments can be modified, if necessary to employ concepts of the various patents, application and publications to provide yet further embodiments.

[0417] These and other changes can be made to the embodiments in light of the above-detailed description. In general, in the following claims, the terms used should not be construed to limit the claims to the specific embodiments disclosed in the specification and the claims, but should be construed to include all possible embodiments along with the full scope of equivalents to which such claims are entitled. Accordingly, the claims are not limited by the disclosure.

The application's sequence listing, which the Patent Office published only in electronic form, follows.

SEQUENCE LISTING (1485 sequences)

SEQ ID NO: 1 - protein, 227 aa, Artificial Sequence
  Made in Lab - Synthesized variable heavy chain sequence
QLQLQESGSGLVKPSQTLSLTCAVSGGSISSGGYSWSWIRQPPGKGLEWIGSIYHSGSTYYNPSLKSRLTISVDTSKNQFSLKLSSVTAADTAVYYCARFYYDILTGYSYFDYWGQGTLVTVSSASTKGPSVFPLAPSSKSTSGGTAALGCLVKDYFPEPVTVSWNSGALTSGVHTFPAVLQSSGLYSLSSVVTVPSSSLGTQTYICNVNHKPSNTKVDKKVEPKSC

SEQ ID NO: 2 - protein, 223 aa, Artificial Sequence
  Made in Lab - Synthesized variable heavy chain sequence
QVQLQESGPGLVKPSETLSLTCTVSGGSISGNNYYWGWIRQPPGKGLEWIGSIYFTGGTYYNPSLKSRVTISVDTSKNQFSLKLSSVTAADTAVYYCARVMLITDAFDIWGQGTMVTVSSASTKGPSVFPLAPSSKSTSGGTAALGCLVKDYFPEPVTVSWNSGALTSGVHTFPAVLQSSGLYSLSSVVTVPSSSLGTQTYICNVNHKPSNTKVDKKVEPKSC

SEQ ID NO: 3 - protein, 224 aa, Artificial Sequence
  Made in Lab - Synthesized variable heavy chain sequence
QVQLQESGPGLVKPSETLSLTCTVSGGAISGTSYFWGWIRQPPGKGLEWIGSIYYTGNTYYNPSLKSRLTVSVDTSKNQFSLNLNSVTAADTATYYCARIGIAVAAPVDHWGQGTLVTVSSASTKGPSVFPLAPSSKSTSGGTAALGCLVKDYFPEPVTVSWNSGALTSGVHTFPAVLQSSGLYSLSSVVTVPSSSLGTQTYICNVNHKPSNTKVDKKVEPKSC

SEQ ID NO: 4 - protein, 223 aa, Artificial Sequence
  Made in Lab - Synthesized variable heavy chain sequence
QVQLQESGPGLVKPSETLSLTCTVSGGSISSSSYYWGWIRQHPGKGLEWIGYIYYSGSTYYNPSLKSRVTISVDTSKNQFSLKLNSVTAADTAVYYCARATYGGDAFDIWGQGTMVTVSSASTKGPSVFPLAPSSKSTSGGTAALGCLVKDYFPEPVTVSWNSGALTSGVHTFPAVLQSSGLYSLSSVVTVPSSSLGTQTYICNVNHKPSNTKVDKKVEPKSC

SEQ ID NO: 5 - protein, 230 aa, Artificial Sequence
  Made in Lab - Synthesized variable heavy chain sequence
QLQLQESGPGLVKPSQTLSLTCTVSGGSISSGGYYWSWIRQHPGKGLEWIGYIYYSGSTYYNPSLKSRVTISVDKSKNQFSLKLSSVTAADTAVYYCARVRDYYDSSGYYYDYFDYWGQGTLVTVSSASTKGPSVFPLAPSSKSTSGGTAALGCLVKDYFPEPVTVSWNSGALTSGVHTFPAVLQSSGLYSLSSVVTVPSSSLGTQTYICNVNHKPSNTKVDKKVEPKSC

SEQ ID NO: 6 - protein, 227 aa, Artificial Sequence
  Made in Lab - Synthesized variable heavy chain sequence
QVQLQQWGAGLLKPSETLSLTCAVSGASFSGHYWTWIRQPPGKGLEWIGEIDHTGSTNYEPSLRSRVTISVDTSKNQFSLNLKSVTAADTAVYYCARGGQGGYDWGHYHGLDVWGQGTTVTVSSASTKGPSVFPLAPSSKSTSGGTAALGCLVKDYFPEPVTVSWNSGALTSGVHTFPAVLQSSGLYSLSSVVTVPSSSLGTQTYICNVNHKPSNTKVDKKVEPKSC

SEQ ID NO: 7 - protein, 225 aa, Artificial Sequence
  Made in Lab - Synthesized variable heavy chain sequence
EVQLLQSGAEVKKPGSSVKVSCKASGGTFTYRYLHWVRQAPGQGLEWMGGIIPIFGTGNYAQKFQGRVTITADESTSTAYMELSSLRSEDTAVYYCASSMVRVPYYYGMDVWGQGTLVTVSSASTKGPSVFPLAPSSKSTSGGTAALGCLVKDYFPEPVTVSWNSGALTSGVHTFPAVLQSSGLYSLSSVVTVPSSSLGTQTYICNVNHKPSNTKVDKKVEPKSC

SEQ ID NO: 8 - protein, 122 aa, Artificial Sequence
  Made in Lab - Synthesized variable heavy chain sequence
EVQLVESGGGLVQAGGSLRLSCTASGSTFSNYAMGWFRQAPGKEREFVAAISWGGGSTFYSGSVKGRFTISRDSAKNTVHLQMDSLIPEDTAVYYCAAGPIARWYRGDMDYWGKGTLVTVSS

SEQ ID NO: 9 - protein, 122 aa, Artificial Sequence
  Made in Lab - Synthesized variable heavy chain sequence
DVQLVESGGGLVQTGGSLRLSCVASGRTFRAYAMGWFRQAPGKEREFVSAISWSGGSTYYAGSVKGRFTISRDSAKNTVHLQMDSLIPEDTAVYYCAAGPIARWYRGDMDYWGKGTLVTVSS

SEQ ID NO: 10 - protein, 122 aa, Artificial Sequence
  Made in Lab - Synthesized variable heavy chain sequence
QVQLVESGGGLVQPGGSLRLSCAASGFTFREYAMTWVRQSPGKRLEWVSGISRDGGRTSYSDSLKGRFTISRDNAKNTLYLQMNNLTPEDTAVYYCAPRVLVTAPSGGMDYWGKGTQVTVSS

SEQ ID NO: 11 - protein, 122 aa, Artificial Sequence
  Made in Lab - Synthesized variable heavy chain sequence
AVQLVDSGGGLMQAGGSLRLSCAASGRTFGTWAMGWFRQAPGKEREFVAAISYNGFSTYYSDAVKGRFTISRDNAKNTMYLQMDSLIPEDTAVYYCAAGPIARWYRGDMDYWGKGTQVTVSS

SEQ ID NO: 12 - protein, 122 aa, Artificial Sequence
  Made in Lab - Synthesized variable heavy chain sequence
AVQLVESGGGLVQAGGPLRLSCAASGRTSSSYAMGWFRQAPGKEREFVAAISWSGGSTYYADSVKGRFTISRDNAKNTVYLQMDSPIPEDTAVYYCAAGPIARWYRGDMDYWGKGTLVTVSS

SEQ ID NO: 13 - protein, 122 aa, Artificial Sequence
  Made in Lab - Synthesized variable heavy chain sequence
AVQLVESGGGLVQAGGSLRLSCTASGRTFSSYAMGWFRQAPGKEREFVAAISWSGRSTYYADSVKGRFTISRDNAKNTVYLQMNSLKSEDTAAYYCAAGPIARWYRGDMDYWGKGTLVTVSS

SEQ ID NO: 14 - protein, 124 aa, Artificial Sequence
  Made in Lab - Synthesized variable heavy chain sequence
DVQLVESGGGLVQAGGSLRLSCAASGRTFSSYAMGWFRQAPGKEREFVAAISWSGGSTYYADSVKGRFTISRDNAKNTVYLQMNSLKPEDTAVYYCAAGPNYSWFMPSSSRLIWGQGTLVTVSS

SEQ ID NO: 15 - protein, 124 aa, Artificial Sequence
  Made in Lab - Synthesized variable heavy chain sequence
QVKLEESGGGLVQAGGSLRLSCAASGGTSSTYAMGWFRQAPGKEREFVAAINRSGGSTYYADSVKGRFTISRDNAKNTVYLQMNSLNPEDTAVYYCAAVFLSRNYEIQEYYRYQGQGTQVTVSS

SEQ ID NO: 16 - protein, 224 aa, Artificial Sequence
  Made in Lab - Synthesized variable heavy chain sequence
QVQLVQSGAEVKKPGASVKVSCKASGGTFSSYAISWVRQAPGQGLEWMGWISTYNGATNYARKFQGRVTMTRDTSTSTVYMELSSLRSEDTAVYYCARGGAGRFGEGMDVWGQGTLVTVSSASTKGPSVFPLAPSSKSTSGGTAALGCLVKDYFPEPVTVSWNSGALTSGVHTFPAVLQSSGLYSLSSVVTVPSSSLGTQTYICNVNHKPSNTKVDKKVEPKSC

SEQ ID NO: 17 - protein, 225 aa, Artificial Sequence
  Made in Lab - Synthesized variable heavy chain sequence
EVQLVQSGAEVKKPGASVKVSCKASGYTFTSYGISWVRQAPGQGLEWMGWISAYNGNTNYAQKLQGRVTMTTDTSTSTAYMELRSLRSDDTAVYYCASSKEKATYYYGMDVWGQGTTVTVSSASTKGPSVFPLAPSSKSTSGGTAALGCLVKDYFPEPVTVSWNSGALTSGVHTFPAVLQSSGLYSLSSVVTVPSSSLGTQTYICNVNHKPSNTKVDKKVEPKSC

SEQ ID NO: 18 - protein, 232 aa, Artificial Sequence
  Made in Lab - Synthesized variable heavy chain sequence
QVQLVQSGAEVKKPGSSVKVSCKASGYTFTNNFMHWVRQAPGQGLEWMGWINPNSGGTKYAQKFQGRVTITADESTSTAYMELSSLRSEDTAVYYCARSVGEVGATMLGIGVWYWFDPWGQGTLVTVSSASTKGPSVFPLAPSSKSTSGGTAALGCLVKDYFPEPVTVSWNSGALTSGVHTFPAVLQSSGLYSLSSVVTVPSSSLGTQTYICNVNHKPSNTKVDKKVEPKSC

SEQ ID NO: 19 - protein, 221 aa, Artificial Sequence
  Made in Lab - Synthesized variable heavy chain sequence
EVQLVESGGGLVKPGGSLRLSCAASGFNFGIYSMTWVRQAPGKGLEWISYISGDSGYTNYADSVKGRFTISRDDSKNTLYLQMNSLKTEDTAVYYCARVGPGGWFDPWGQGTLVTVSSASTKGPSVFPLAPSSKSTSGGTAALGCLVKDYFPEPVTVSWNSGALTSGVHTFPAVLQSSGLYSLSSVVTVPSSSLGTQTYICNVNHKPSNTKVDKKVEPKSC

SEQ ID NO: 20 - protein, 226 aa, Artificial Sequence
  Made in Lab - Synthesized variable heavy chain sequence
QVQLVQSGAEVKKPGASVKVSCKASGYTFTNNFMHWVRQAPGQGLEWMGRINPNSGGTNYAQKFQGRVTMTRDTSTSTVYMELSSLRSEDTAVYYCASQNYYGSGSYPGFDYWGQGTLVNVSSASTKGPSVFPLAPSSKSTSGGTAALGCLVKDYFPEPVTVSWNSGALTSGVHTFPAVLQSSGLYSLSSVVTVPSSSLGTQTYICNVNHKPSNTKVDKKVEPKSC

SEQ ID NO: 21 - protein, 223 aa, Artificial Sequence
  Made in Lab - Synthesized variable heavy chain sequence
QVQLVQSGAEVKKPGSSVKVSCKASGYTFTYRYLHWVRQAPGQGLEWMGGIIPIFGTANYAQKFQGRVTITADESTSTAYMELSSLRSEDTAVYYCATHDSSGYYSFDYWGQGTLVTVSSASTKGPSVFPLAPSSKSTSGGTAALGCLVKDYFPEPVTVSWNSGALTSGVHTFPAVLQSSGLYSLSSVVTVPSSSLGTQTYICNVNHKPSNTKVDKKVEPKSC

SEQ ID NO: 22 - protein, 221 aa, Artificial Sequence
  Made in Lab - Synthesized variable heavy chain sequence
QVQLVQSGAEVKKPGASVKVSCKASGYTFTNNFMHWVRQAPGQGLEWMGGFDPEDGETIYAQKFQGRVTMTRDTSTSTVYMELSSLRSEDTAVYYCARVGRGYSFDYWGQGTLVTVSSASTKGPSVFPLAPSSKSTSGGTAALGCLVKDYFPEPVTVSWNSGALTSGVHTFPAVLQSSGLYSLSSVVTVPSSSLGTQTYICNVNHKPSNTKVDKKVEPKSC

SEQ ID NO: 23 - protein, 218 aa, Artificial Sequence
  Made in Lab - Synthesized variable heavy chain sequence
EVQLVESGGGLVQPGGSLRLSCAASGFTFSDHYMSWVRQAPGKGLEWVALVGYDGSQQFYGESVKGRFTISRDNSKNTLYLQMNSLRAEDTAVYYCNTGIPMLYWGQGTLVTVSSASTKGPSVFPLAPSSKSTSGGTAALGCLVKDYFPEPVTVSWNSGALTSGVHTFPAVLQSSGLYSLSSVVTVPSSSLGTQTYICNVNHKPSNTKVDKKVEPKSC

SEQ ID NO: 24 - protein, 223 aa, Artificial Sequence
  Made in Lab - Synthesized variable heavy chain sequence
QVQLVQSGAEVKKPGSSVKVSCKASGGTFSSYAISWVRQAPGQGLEWMGRIIPILGIANYAQKFQGRVTITADESTSTAYMELSSLRSEDTAVYYCARESVNNYYYMDVWGKGTTVTVSSASTKGPSVFPLAPSSKSTSGGTAALGCLVKDYFPEPVTVSWNSGALTSGVHTFPAVLQSSGLYSLSSVVTVPSSSLGTQTYICNVNHKPSNTKVDKKVEPKSC

SEQ ID NO: 25 - protein, 228 aa, Artificial Sequence
  Made in Lab - Synthesized variable heavy chain sequence
QVQLVQSGAEVKKPGASVKVSCKASGYTFTNNFMHWVRQAPGQGLEWMGRINPNSGGTNYAQKFQGRVTMTRDTSTSTVYMELSSLRSEDTAVYYCARGQGYSSGWYRGDAFDIWGQGTTVTVSSASTKGPSVFPLAPSSKSTSGGTAALGCLVKDYFPEPVTVSWNSGALTSGVHTFPAVLQSSGLYSLSSVVTVPSSSLGTQTYICNVNHKPSNTKVDKKVEPKSC

SEQ ID NO: 26 - protein, 227 aa, Artificial Sequence
  Made in Lab - Synthesized variable heavy chain sequence
QVQLVQSGAEVKKPGASVKVSCKASGFTFTSSAVQWVRQAPGQGLEWMGWMNPNSGNTGYAQKFQGRVTMTRDTSTSTVYMELSSLRSEDTAVYYCARGRGQQWLTGYYGMDVWGQGTTVTVSSASTKGPSVFPLAPSSKSTSGGTAALGCLVKDYFPEPVTVSWNSGALTSGVHTFPAVLQSSGLYSLSSVVTVPSSSLGTQTYICNVNHKPSNTKVDKKVEPKSC

SEQ ID NO: 27 - protein, 225 aa, Artificial Sequence
  Made in Lab - Synthesized variable heavy chain sequence
EVQLVESGGGLVQPGGSLRLSCAASGFAFSSHWMHWVRQAPGKGLEWVSAIDGSGGSTYYADSVKGRFTISRDNSKNTLYLQMNSLRAEDTAVYYCARDRQLGWAHWYFDLWGRGTLVTVSSASTKGPSVFPLAPSSKSTSGGTAALGCLVKDYFPEPVTVSWNSGALTSGVHTFPAVLQSSGLYSLSSVVTVPSSSLGTQTYICNVNHKPSNTKVDKKVEPKSC

SEQ ID NO: 28 - protein, 227 aa, Artificial Sequence
  Made in Lab - Synthesized variable heavy chain sequence
EVQLVQSGGGLVQPGGSLRLSCAASGFNLRRYNMNWVRQAPGKGLEWVSRISNSGSLVYYADSVKGRFTISRDNSKNTLYLQMNSLRAEDTAVYYCARDADSSGYYRYDAFDIWGQGTMVTVSSASTKGPSVFPLAPSSKSTSGGTAALGCLVKDYFPEPVTVSWNSGALTSGVHTFPAVLQSSGLYSLSSVVTVPSSSLGTQTYICNVNHKPSNTKVDKKVEPKSC

SEQ ID NO: 29 - protein, 221 aa, Artificial Sequence
  Made in Lab - Synthesized variable heavy chain sequence
QVQLVQSGAEVKKPGSSVKVSCKASGGAFSTSSISWVRQAPGQGLEWVGRIIPVLGTANYAQKFQGRVTITADESTSTAYMELSSLRSEDTAVYYCAKGGWRSSFDPWGQGTLVTVSSASTKGPSVFPLAPSSKSTSGGTAALGCLVKDYFPEPVTVSWNSGALTSGVHTFPAVLQSSGLYSLSSVVTVPSSSLGTQTYICNVNHKPSNTKVDKKVEPKSC

SEQ ID NO: 30 - protein, 223 aa, Artificial Sequence
  Made in Lab - Synthesized variable heavy chain sequence
QVQLVQSGAEVKKPGASVKVSCKASGYTFTSYDINWVRQAPGQGLEWMGGFDPEDGETIYAQKFQGRVTMTRDTSTSTVYMELSSLRSEDTAVYYCAKAGDWGLYGMDVWGQGTMVTVSSASTKGPSVFPLAPSSKSTSGGTAALGCLVKDYFPEPVTVSWNSGALTSGVHTFPAVLQSSGLYSLSSVVTVPSSSLGTQTYICNVNHKPSNTKVDKKVEPKSC

SEQ ID NO: 31 - protein, 230 aa, Artificial Sequence
  Made in Lab - Synthesized variable heavy chain sequence
QVQLVQSGAEVKKPGASVKVSCKASGYTFTNNFMHWVRQAPGQGLEWMGWINPNSGDTKFAPKFQGRVTMTRDTSTSTVYMELSSLRSEDTAVYYCAREANYDILTGYIRPDAFDIWGQGTTVTVSSASTKGPSVFPLAPSSKSTSGGTAALGCLVKDYFPEPVTVSWNSGALTSGVHTFPAVLQSSGLYSLSSVVTVPSSSLGTQTYICNVNHKPSNTKVDKKVEPKSC

SEQ ID NO: 32 - protein, 224 aa, Artificial Sequence
  Made in Lab - Synthesized variable heavy chain sequence
QVQLVQSGAEVKKPGASVKVSCKASGYTFTSYYMNWVRQAPGQGLEWMGIISPSGGSTSYAQKFQGRVTMTRDTSTSTVYMELSSLRSEDTAVYYCARWGDYGDLYYFDYWGQGTLVTVSSASTKGPSVFPLAPSSKSTSGGTAALGCLVKDYFPEPVTVSWNSGALTSGVHTFPAVLQSSGLYSLSSVVTVPSSSLGTQTYICNVNHKPSNTKVDKKVEPKSC

SEQ ID NO: 33 - protein, 228 aa, Artificial Sequence
  Made in Lab - Synthesized variable heavy chain sequence
QVQLVQSGAEVKKPGASVKVSCKASGYIFTDYYMHWVRQAPGQGLEWMGWMNPNSGNTGYAQKFQGRVTMTRDTSTSTVYMELSSLRSEDTAVYYCARGGSRYDFWSGHWYFDLWGRGTLVTVSSASTKGPSVFPLAPSSKSTSGGTAALGCLVKDYFPEPVTVSWNSGALTSGVHTFPAVLQSSGLYSLSSVVTVPSSSLGTQTYICNVNHKPSNTKVDKKVEPKSC

SEQ ID NO: 34 - protein, 227 aa, Artificial Sequence
  Made in Lab - Synthesized variable heavy chain sequence
EVQLVQSGGGLVKPGGSLRLSCAASGFTFSSYSMNWVRQAPGKGLEWVSYIENDGSITTYADSVKGRFTISRDDSKNTLYLQMNSLKTEDTAVYYCARAPYYYGSGSLFRLDYWGQGTLVTVSSASTKGPSVFPLAPSSKSTSGGTAALGCLVKDYFPEPVTVSWNSGALTSGVHTFPAVLQSSGLYSLSSVVTVPSSSLGTQTYICNVNHKPSNTKVDKKVEPKSC

SEQ ID NO: 35 - protein, 219 aa, Artificial Sequence
  Made in Lab - Synthesized variable heavy chain sequence
EVQLVESGGGLVKPGGSLRLSCAASGFTFSSYAMHWVRQAPGKGLEWVSAIGAGGGTYYADSVKGRFTISRDDSKNTLYLQMNSLKTEDTAVYYCARDAYNWFDPWGQGTLVTVSSASTKGPSVFPLAPSSKSTSGGTAALGCLVKDYFPEPVTVSWNSGALTSGVHTFPAVLQSSGLYSLSSVVTVPSSSLGTQTYICNVNHKPSNTKVDKKVEPKSC

SEQ ID NO: 36 - protein, 222 aa, Artificial Sequence
  Made in Lab - Synthesized variable heavy chain sequence
EVQLVESGGGLVKPGGSLRLSCAASGFTFSNAQMSWVRQAPGKGLEWVSAIGTGGGTYYADSVKGRFTISRDDSKNTLYLQMNSLKTEDTAVYYCAREGSYYDWYFDLWGRGTLVTVSSASTKGPSVFPLAPSSKSTSGGTAALGCLVKDYFPEPVTVSWNSGALTSGVHTFPAVLQSSGLYSLSSVVTVPSSSLGTQTYICNVNHKPSNTKVDKKVEPKSC

SEQ ID NO: 37 - protein, 116 aa, Artificial Sequence
  Made in Lab - Synthesized variable heavy chain sequence
AVQQVESGGGLVQPGGSLRLSCAASGFTLDYYAISWFRQAPGKKRELVADITSGGSTNYADSVKGRFTISRDNAKNTIYLQMNSLKPEDTAVYFCNAVTYNGYTIWGQGTQVTVSS

SEQ ID NO: 38 - protein, 220 aa, Artificial Sequence
  Made in Lab - Synthesized variable light chain sequence
DIVMTHTPLSLSVTPGEPASISCRSSRSLLDTDDGNTYLDWYLQKPGQSPQLLIHTLSHRASGVPDRFSGSGSGTDFTLKISRVEAEDVGVYYCMQSIQLPWTFGQGTKVEIKRTVAAPSVFIFPPSDEQLKSGTASVVCLLNNFYPREAKVQWKVDNALQSGNSQESVTEQDSKDSTYSLSSTLTLSKADYEKHKVYACEVTHQGLSSPVTKSFNRGEC

SEQ ID NO: 39 - protein, 219 aa, Artificial Sequence
  Made in Lab - Synthesized variable light chain sequence
DVVMTQSPLSLPVTPGEPASISCRSSQSLLHSNGYNYLDWYLQKPGQSPQLLIYLGSNRASGVPDRFSGSGSGTDFTLKISRVEAEDVGVYYCMQGTHWPYTFGQGTKLEIKRTVAAPSVFIFPPSDEQLKSGTASVVCLLNNFYPREAKVQWKVDNALQSGNSQESVTEQDSKDSTYSLSSTLTLSKADYEKHKVYACEVTHQGLSSPVTKSFNRGEC

SEQ ID NO: 40 - protein, 214 aa, Artificial Sequence
  Made in Lab - Synthesized variable light chain sequence
EIVLTQSPATLSLSPGEGATLSCRASQSVGTYLTWYRQKPGQAPRLLIYDASNRATGIPARFSGSGAGTDFTLKISRVEAEDVGVYYCMQATQFPLTFGQGTKVEIKRTVAAPSVFIFPPSDEQLKSGTASVVCLLNNFYPREAKVQWKVDNALQSGNSQESVTEQDSKDSTYSLSSTLTLSKADYEKHKVYACEVTHQGLSSPVTKSFNRGEC

SEQ ID NO: 41 - protein, 217 aa, Artificial Sequence
  Made in Lab - Synthesized variable light chain sequence
QSVVTQPPSVSGAPGQRVTISCTRSSSNIGAGYDVHWYQQHPGTAPKLLIFGNSIRPSGVPDRFSGSKSGTSATLGITGLQTGDEADYYCGTWDSSLSAWVFGGGTKLTVLGQPKAAPSVTLFPPSSEELQANKATLVCLISDFYPGAVTVAWKADSSPVKAGVETTTPSKQSNNKYAASSYLSLTPEQWKSHRSYSCQVTHEGSTVEKTVAPTECS

SEQ ID NO: 42 - protein, 214 aa, Artificial Sequence
  Made in Lab - Synthesized variable light chain sequence
DIQLTQSPSSLSASVGDRVTITCRASRSISSYFNWYQQKPGKAPKLLIYAASSLQSGVPSRFSGSRSGTDFTLTISSLQPEDFATYYCQQADTFPPTFGQGTRLEIKRTVAAPSVFIFPPSDEQLKSGTASVVCLLNNFYPREAKVQWKVDNALQSGNSQESVTEQDSKDSTYSLSSTLTLSKADYEKHKVYACEVTHQGLSSPVTKSFNRGEC

SEQ ID NO: 43 - protein, 213 aa, Artificial Sequence
  Made in Lab - Synthesized variable light chain sequence
SYVLTQPPSVSVSPGQTASITCSGDKVGHKYASWYQQKPGQSPVLVIYEDSQRPSGIPVRFSGSNSGNTATLTISGTQAMDEADYYCQAWDSSTDVVFGGGTKLTVLGQPKAAPSVTLFPPSSEELQANKATLVCLISDFYPGAVTVAWKADSSPVKAGVETTTPSKQSNNKYAASSYLSLTPEQWKSHRSYSCQVTHEGSTVEKTVAPTECS

SEQ ID NO: 44 - protein, 214 aa, Artificial Sequence
  Made in Lab - Synthesized variable light chain sequence
DIQMTQSPSSLSASVGDRVTITCRASQSISSYLNWYQQKPGKAPKLLIYAASSLQSGVPSRFSGSGSGTDFTLTISSLQPEDFATYYCQQSYSTPLTFGGGTKVEIKRTVAAPSVFIFPPSDEQLKSGTASVVCLLNNFYPREAKVQWKVDNALQSGNSQESVTEQDSKDSTYSLSSTLTLSKADYEKHKVYACEVTHQGLSSPVTKSFNRGEC

SEQ ID NO: 45 - protein, 214 aa, Artificial Sequence; identical to SEQ ID NO: 44
  Made in Lab - Synthesized variable light chain sequence

SEQ ID NO: 46 - protein, 216 aa, Artificial Sequence
  Made in Lab - Synthesized variable light chain sequence
QAVVLQEPSLSVSPGGTVTLTCGLSSGSVSTNYYPSWYQQTPGQAPRTLIYYTNTRSSDVPERFSGSIVGNKAALTITGAQPDDESVYFCLLYLGRGIWVFGGGTKLTVLGQPKAAPSVTLFPPSSEELQANKATLVCLISDFYPGAVTVAWKADSSPVKAGVETTTPSKQSNNKYAASSYLSLTPEQWKSHRSYSCQVTHEGSTVEKTVAPTECS

SEQ ID NO: 47 - protein, 214 aa, Artificial Sequence
  Made in Lab - Synthesized variable light chain sequence
DIQMTQSPSSLSASVGDRVTITCRASQSISSYLNWYQQKPGKAPKLLIYAASSLQSGVPSRFSGSGSGTDFTLTISSLQPEDFATYYCQQSYRTPFTFGPGTKVDIKRTVAAPSVFIFPPSDEQLKSGTASVVCLLNNFYPREAKVQWKVDNALQSGNSQESVTEQDSKDSTYSLSSTLTLSKADYEKHKVYACEVTHQGLSSPVTKSFNRGEC

SEQ ID NO: 48 - protein, 214 aa, Artificial Sequence
  Made in Lab - Synthesized variable light chain sequence
DIQMTQSPSSLSASVGDRVTITCRASQGISSYLAWYQQKPGKAPKLLIYAASNLLGGVPSRFSGSGSGTDFTLTISSLQPEDFATYYCQQTYSTPWTFGQGTKVEIKRTVAAPSVFIFPPSDEQLKSGTASVVCLLNNFYPREAKVQWKVDNALQSGNSQESVTEQDSKDSTYSLSSTLTLSKADYEKHKVYACEVTHQGLSSPVTKSFNRGEC

SEQ ID NO: 49 - protein, 214 aa, Artificial Sequence; identical to SEQ ID NO: 44
  Made in Lab - Synthesized variable light chain sequence

SEQ ID NO: 50 - protein, 214 aa, Artificial Sequence; identical to SEQ ID NO: 44
  Made in Lab - Synthesized variable light chain sequence

SEQ ID NO: 51 - protein, 214 aa, Artificial Sequence; identical to SEQ ID NO: 44
  Made in Lab - Synthesized variable light chain sequence

SEQ ID NO: 52 - protein, 214 aa, Artificial Sequence; identical to SEQ ID NO: 44
  Made in Lab - Synthesized variable light chain sequence

SEQ ID NO: 53 - protein, 214 aa, Artificial Sequence; identical to SEQ ID NO: 44
  Made in Lab - Synthesized variable light chain sequence

SEQ ID NO: 54 - protein, 214 aa, Artificial Sequence; identical to SEQ ID NO: 44
  Made in Lab - Synthesized variable light chain sequence

SEQ ID NO: 55 - protein, 214 aa, Artificial Sequence
  Made in Lab - Synthesized variable light chain sequence
DIQMTQSPSSLSASVGDRVTITCRASQGISSALAWYQQKPGKAPKLLIYGASTLQSGVPSRFSGSGSGTDFTLTISSLQPEDFATYYCLQDYNYPFTFGPGTKVDIKRTVAAPSVFIFPPSDEQLKSGTASVVCLLNNFYPREAKVQWKVDNALQSGNSQESVTEQDSKDSTYSLSSTLTLSKADYEKHKVYACEVTHQGLSSPVTKSFNRGEC

SEQ ID NO: 56 - protein, 214 aa, Artificial Sequence; identical to SEQ ID NO: 44
  Made in Lab - Synthesized variable light chain sequence

SEQ ID NO: 57 - protein, 214 aa, Artificial Sequence
  Made in Lab - Synthesized variable light chain sequence
EIVLTQSPATLSVSPGERATLSCRASQSVSSNLAWYQQKPGQAPRLLIYDASNRATGIPARFSGSGSGTEFTLTISSLQSEDFAVYYCQQRNNWLYTFGQGTKVEIKRTVAAPSVFIFPPSDEQLKSGTASVVCLLNNFYPREAKVQWKVDNALQSGNSQESVTEQDSKDSTYSLSSTLTLSKADYEKHKVYACEVTHQGLSSPVTKSFNRGEC

SEQ ID NO: 58 - protein, 214 aa, Artificial Sequence
  Made in Lab - Synthesized variable light chain sequence
EIVLTQSPATLSVSPGERATLSCRASQSVSSNLAWYQQKPGQAPRLLIYGASTRATGIPARFSGSGSGTEFTLTISSLQSEDFAVYYCQQYNSWPLTFGQGTKVEIKRTVAAPSVFIFPPSDEQLKSGTASVVCLLNNFYPREAKVQWKVDNALQSGNSQESVTEQDSKDSTYSLSSTLTLSKADYEKHKVYACEVTHQGLSSPVTKSFNRGEC

SEQ ID NO: 59 - protein, 214 aa, Artificial Sequence
  Made in Lab - Synthesized variable light chain sequence
DIQMTQSPSSLSASVGDRVTITCRASQSISRWLAWYQQKPGKAPKLLIYAASSLQSGVPSRFSGSGSGTDFTLTISSLQPEDFATYYCQQTNTFPFTFGPGTKVDIKRTVAAPSVFIFPPSDEQLKSGTASVVCLLNNFYPREAKVQWKVDNALQSGNSQESVTEQDSKDSTYSLSSTLTLSKADYEKHKVYACEVTHQGLSSPVTKSFNRGEC

SEQ ID NO: 60 - protein, 214 aa, Artificial Sequence
  Made in Lab - Synthesized variable light chain sequence
EIVLTQSPATLSVSPGERATLSCRASQSLRSKLAWYQQKPGQAPRLLIYGASTRATGIPARFSGSGSGTEFTLTISSLQSEDFAVYYCQQYANSPWTFGPGTKVDIKRTVAAPSVFIFPPSDEQLKSGTASVVCLLNNFYPREAKVQWKVDNALQSGNSQESVTEQDSKDSTYSLSSTLTLSKADYEKHKVYACEVTHQGLSSPVTKSFNRGEC

SEQ ID NO: 61 - protein, 214 aa, Artificial Sequence
  Made in Lab - Synthesized variable light chain sequence
DIQMTQSPSSLSASVGDRVTITCRASQGISSALAWYQQKPGKAPKLLIYATSTLQSGVPSRFSGSGSGTDFTLTISSLQPEDFATYYCQQVNSYPPTFGQGTKLEIKRTVAAPSVFIFPPSDEQLKSGTASVVCLLNNFYPREAKVQWKVDNALQSGNSQESVTEQDSKDSTYSLSSTLTLSKADYEKHKVYACEVTHQGLSSPVTKSFNRGEC

SEQ ID NO: 62 - protein, 214 aa, Artificial Sequence
  Made in Lab - Synthesized variable light chain sequence
DIQMTQSPSSLSASVGDRVTITCRASQGISNYLAWYQQKPGKAPKLLIYAASSLQSGVPSRFSGSGSGTDFTLTISSLQPEDFATYYCQQSYSTPFTFGQGTKVEIKRTVAAPSVFIFPPSDEQLKSGTASVVCLLNNFYPREAKVQWKVDNALQSGNSQESVTEQDSKDSTYSLSSTLTLSKADYEKHKVYACEVTHQGLSSPVTKSFNRGEC

SEQ ID NO: 63 - protein, 214 aa, Artificial Sequence; identical to SEQ ID NO: 44
  Made in Lab - Synthesized variable light chain sequence

SEQ ID NO: 64 - protein, 214 aa, Artificial Sequence; identical to SEQ ID NO: 44
  Made in Lab - Synthesized variable light chain sequence

SEQ ID NO: 65 - protein, 216 aa, Artificial Sequence
  Made in Lab - Synthesized variable light chain sequence
EIVLTQSPATLSVSPGERATLSCRASQNIGSRLAWYQQKPGQAPRLLIYGASNRASGIPARFSGSGSGTEFTLTISSLQSEDFAVYYCQQYNHWPPLFTFGPGTKVDIKRTVAAPSVFIFPPSDEQLKSGTASVVCLLNNFYPREAKVQWKVDNALQSGNSQESVTEQDSKDSTYSLSSTLTLSKADYEKHKVYACEVTHQGLSSPVTKSFNRGEC

SEQ ID NO: 66 - protein, 120 aa, Artificial Sequence
  Made in Lab - 004S-D01 Heavy Chain
EVQLVESGGGLVKPGGSLRLSCAASGFTFTNYAMSWVRQAPGKGLEWVSAISGSGGSTYYADSVKGRFTISRDDSKNTLYLQMNSLKTEDTAVYYCARATGFGTVVFDYWGQGTLVTVSS

SEQ ID NO: 67 - protein, 107 aa, Artificial Sequence [sequence omitted]

SEQ ID NO: 68 - protein, 119 aa, Artificial Sequence
  Made in Lab - 004S-E09 Heavy Chain
QVQLVQSGAEVKKPGASVKVSCKASGDTFSNYVISWVRQAPGQGLEWMGRISAYNGYKSYAQNFQGRVTMTRDTSTSTVYMELSSLRSEDTAVYYCARSSGYVGWFDPWGQGTLVTVSS

SEQ ID NO: 69 - protein, 107 aa, Artificial Sequence [sequence omitted]

SEQ ID NO: 70 - protein, 90 aa, Homo sapiens
KMYHTKGQEGSVCLRSSDCASGLCCARHFWSKICKPVLKEGQVCTKHRRKGSHGLEIFQRCYCGEGLSCRIQKDHHQASNSSRLHTCQRH

SEQ ID NO: 71 - protein, 88 aa, Homo sapiens
KMSHIKGHEGDPCLRSSDCIEGFCCARHFWTKICKPVLHQGEVCTKQRKKGSHGLEIFQRCDCAKGLSCKVWKDATYSSKARLHVCQK

SEQ ID NO: 72 - protein, 9 aa, Artificial Sequence
  Synthesized molecular recognition unit - heavy CDR1
ASFSGHYWT

SEQ ID NO: 73 - protein, 11 aa, Artificial Sequence
  Synthesized molecular recognition unit - heavy CDR1
ASVSSNSAAWN

SEQ ID NO: 74 - protein, 11 aa, Artificial Sequence
  Synthesized molecular recognition unit - heavy CDR1
DSVSSNSAAWN

SEQ ID NO: 75 - protein, 11 aa, Artificial Sequence
  Synthesized molecular recognition unit - heavy CDR1
DSVSSNSATWN

SEQ ID NO: 76 - protein, 11 aa, Artificial Sequence
  Synthesized molecular recognition unit - heavy CDR1
DSVSSNSGAWN

SEQ ID NO: 77 - protein, 9 aa, Artificial Sequence
  Synthesized molecular recognition unit - heavy CDR1
DTFSNYVIS

SEQ ID NO: 78 - protein, 9 aa, Artificial Sequence
  Synthesized molecular recognition unit - heavy CDR1
DTFSNYVLS

SEQ ID NO: 79 - protein, 9 aa, Artificial Sequence
  Synthesized molecular recognition unit - heavy CDR1
FAFDDYAMH

SEQ ID NO: 80 - protein, 9 aa, Artificial Sequence
  Synthesized molecular recognition unit - heavy CDR1
FAFSSHWMH

SEQ ID NO: 81 - protein, 9 aa, Artificial Sequence
  Synthesized molecular recognition unit - heavy CDR1
FAFSSYAMS

SEQ ID NO: 82 - protein, 9 aa, Artificial Sequence
  Synthesized molecular recognition unit - heavy CDR1
FAVSSSYMS

SEQ ID NO: 83 - protein, 9 aa, Artificial Sequence
  Synthesized molecular recognition unit - heavy CDR1
FFFSGYWMS

SEQ ID NO: 84 - protein, 9 aa, Artificial Sequence
  Synthesized molecular recognition unit - heavy CDR1
FIFSDYYMS

SEQ ID NO: 85 - protein, 9 aa, Artificial Sequence
  Synthesized molecular recognition unit - heavy CDR1
FIFSZYAMS

SEQ ID NO: 86 - protein, 9 aa, Artificial Sequence
  Synthesized molecular recognition unit - heavy CDR1
FNFGIYSMT

SEQ ID NO: 87 - protein, 9 aa, Artificial Sequence
  Synthesized molecular recognition unit - heavy CDR1
FNFSSYTMR

SEQ ID NO: 88 - protein, 9 aa, Artificial Sequence
  Synthesized molecular recognition unit - heavy CDR1
FNIRRZNMZ

SEQ ID NO: 89 - protein, 9 aa, Artificial Sequence
  Synthesized molecular recognition unit - heavy CDR1
FNLRRYNMN

SEQ ID NO: 90 - protein, 9 aa, Artificial Sequence
  Synthesized molecular recognition unit - heavy CDR1
FPFSTFSMN

SEQ ID NO: 91 - protein, 9 aa, Artificial Sequence
  Synthesized molecular recognition unit - heavy CDR1
FRFISHPIH

SEQ ID NO: 92 - protein, 9 aa, Artificial Sequence
  Synthesized molecular recognition unit - heavy CDR1
FSFRSYSMS

SEQ ID NO: 93 - protein, 9 aa, Artificial Sequence
  Synthesized molecular recognition unit - heavy CDR1
FSFSKKYMT

SEQ ID NO: 94 - protein, 9 aa, Artificial Sequence
  Synthesized molecular recognition unit - heavy CDR1
FSFSRYGMS

SEQ ID NO: 95 - protein, 9 aa, Artificial Sequence
  Synthesized molecular recognition unit - heavy CDR1
FSFSSTAMS

SEQ ID NO: 96 - protein, 9 aa, Artificial Sequence
  Synthesized molecular recognition unit - heavy CDR1
FSFSSYGMH

SEQ ID NO: 97 - protein, 9 aa, Artificial Sequence
  Synthesized molecular recognition unit - heavy CDR1
FSFSSYGMS

SEQ ID NO: 98 - protein, 9 aa, Artificial Sequence
  Synthesized molecular recognition unit - heavy CDR1
FSFSTYTMS

SEQ ID NO: 99 - protein, 9 aa, Artificial Sequence
  Synthesized molecular recognition unit - heavy CDR1
FSLSSYGMH

SEQ ID NO: 100 - protein, 9 aa, Artificial Sequence
  Synthesized molecular recognition unit - heavy CDR1
FSVGSNYMT

SEQ ID NO: 101 - protein, 9 aa, Artificial Sequence
  Synthesized molecular recognition unit - heavy CDR1
FSVSSNYMN

SEQ ID NO: 102 - protein, 9 aa, Artificial Sequence
  Synthesized molecular recognition unit - heavy CDR1
FTFADYGMH

SEQ ID NO: 103 - protein, 9 aa, Artificial Sequence
  Synthesized molecular recognition unit - heavy CDR1
FTFANYAMH

SEQ ID NO: 104 - protein, 9 aa, Artificial Sequence
  Synthesized molecular recognition unit - heavy CDR1
FTFANYAMN

SEQ ID NO: 105 - protein, 9 aa, Artificial Sequence
  Synthesized molecular recognition unit - heavy CDR1
FTFDDYAMH

SEQ ID NO: 106 - protein, 9 aa, Artificial Sequence
  Synthesized molecular recognition unit - heavy CDR1
FTFDDYGMH

SEQ ID NO: 107 - protein, 9 aa, Artificial Sequence
  Synthesized molecular recognition unit - heavy CDR1
FTFDDYYMN

SEQ ID NO: 108 - protein, 9 aa, Artificial Sequence
  Synthesized molecular recognition unit - heavy CDR1
FTFDHNPMN

SEQ ID NO: 109 - protein, 9 aa, Artificial Sequence
  Synthesized molecular recognition unit - heavy CDR1
FTFGNYDMN

SEQ ID NO: 110 - protein, 9 aa, Artificial Sequence
  Synthesized molecular recognition unit - heavy CDR1
FTFGTYWVT

SEQ ID NO: 111 - protein, 9 aa, Artificial Sequence
  Synthesized molecular recognition unit - heavy CDR1
FTFNRHALS

SEQ ID NO: 112 - protein, 9 aa, Artificial Sequence
  Synthesized molecular recognition unit - heavy CDR1
FTFRDYAMN

SEQ ID NO: 113 - protein, 9 aa, Artificial Sequence
  Synthesized molecular recognition unit - heavy CDR1
FTFREYAMT

SEQ ID NO: 114 - protein, 9 aa, Artificial Sequence
  Synthesized molecular recognition unit - heavy CDR1
FTFRMYGMH

SEQ ID NO: 115 - protein, 9 aa, Artificial Sequence
  Synthesized molecular recognition unit - heavy CDR1
FTFRNSAMH

SEQ ID NO: 116 - protein, 9 aa, Artificial Sequence
  Synthesized molecular recognition unit - heavy CDR1
FTFRSYGMH

SEQ ID NO: 117 - protein, 9 aa, Artificial Sequence
  Synthesized molecular recognition unit - heavy CDR1
FTFSDFGMN

SEQ ID NO: 118 - protein, 9 aa, Artificial Sequence
  Synthesized molecular recognition unit - heavy CDR1
FTFSDHYMD

SEQ ID NO: 119 - protein, 9 aa, Artificial Sequence
  Synthesized molecular recognition unit - heavy CDR1
FTFSDHYMS

SEQ ID NO: 120 - protein, 9 aa, Artificial Sequence
  Synthesized molecular recognition unit - heavy CDR1
FTFSDSYMS

SEQ ID NO: 121 - protein, 9 aa, Artificial Sequence
  Synthesized molecular recognition unit - heavy CDR1
FTFSDYGMH

SEQ ID NO: 122 - protein, 9 aa, Artificial Sequence
  Synthesized molecular recognition unit - heavy CDR1
FTFSDYYMS

SEQ ID NO: 123 - protein, 9 aa, Artificial Sequence
  Synthesized molecular recognition unit - heavy CDR1
FTFSIYGMH

SEQ ID NO: 124 - protein, 9 aa, Artificial Sequence
  Synthesized molecular recognition unit - heavy CDR1
FTFSNAQMS

SEQ ID NO: 125 - protein, 9 aa, Artificial Sequence
  Synthesized molecular recognition unit - heavy CDR1
FTFSNAWMS

SEQ ID NO: 126 - protein, 9 aa, Artificial Sequence
  Synthesized molecular recognition unit - heavy CDR1
FTFSNHYMS

SEQ ID NO: 127 - protein, 9 aa, Artificial Sequence
  Synthesized molecular recognition unit - heavy CDR1
FTFSNHYTS

SEQ ID NO: 128 - protein, 9 aa, Artificial Sequence
  Synthesized molecular recognition unit - heavy CDR1
FTFSNSDMN

SEQ ID NO: 129 - protein, 9 aa, Artificial Sequence
  Synthesized molecular recognition unit - heavy CDR1
FTFSNYAMH

SEQ ID NO: 130 - protein, 9 aa, Artificial Sequence
  Synthesized molecular recognition unit - heavy CDR1
FTFSNYAMT

SEQ ID NO: 131 - protein, 9 aa, Artificial Sequence
  Synthesized molecular recognition unit - heavy CDR1
FTFSNYGMH

SEQ ID NO: 132 - protein, 9 aa, Artificial Sequence
  Synthesized molecular recognition unit - heavy CDR1
FTFSNYYTS

SEQ ID NO: 133 - protein, 9 aa, Artificial Sequence
  Synthesized molecular recognition unit - heavy CDR1
FTFSRYAMH

SEQ ID NO: 134 - protein, 9 aa, Artificial Sequence
  Synthesized molecular recognition unit - heavy CDR1
FTFSRYAMS

SEQ ID NO: 135 - protein, 9 aa, Artificial Sequence
  Synthesized molecular recognition unit - heavy CDR1
FTFSSFGMH

SEQ ID NO: 136 - protein, 9 aa, Artificial Sequence
  Synthesized molecular recognition unit - heavy CDR1
FTFSSHSTH

SEQ ID NO: 137 - protein, 9 aa, Artificial Sequence
  Synthesized molecular recognition unit - heavy CDR1
FTFSSNAMH

SEQ ID NO: 138 - protein, 9 aa, Artificial Sequence
  Synthesized molecular recognition unit - heavy CDR1
FTFSSSAMH

SEQ ID NO: 139 - protein, 9 aa, Artificial Sequence
  Synthesized molecular recognition unit - heavy CDR1
FTFSSSNMN

SEQ ID NO: 140 - protein, 9 aa, Artificial Sequence
  Synthesized molecular recognition unit - heavy CDR1
FTFSSSWMH

SEQ ID NO: 141 - protein, 9 aa, Artificial Sequence
  Synthesized molecular recognition unit - heavy CDR1
FTFSSYAMS

SEQ ID NO: 142 - protein, 9 aa, Artificial Sequence
  Synthesized molecular recognition unit - heavy CDR1
FTFSSYDMN

SEQ ID NO: 143 - protein, 9 aa, Artificial Sequence
  Synthesized molecular recognition unit - heavy CDR1
FTFSSYGMH

SEQ ID NO: 144 - protein, 9 aa, Artificial Sequence
  Synthesized molecular recognition unit - heavy CDR1
FTFSSYGMS

SEQ ID NO: 145 - protein, 9 aa, Artificial Sequence
  Synthesized molecular recognition unit - heavy CDR1
FTFSSYNMN

SEQ ID NO: 146 - protein, 9 aa, Artificial Sequence
  Synthesized molecular recognition unit - heavy CDR1
FTFSSYSMN

SEQ ID NO: 147 - protein, 9 aa, Artificial Sequence
  Synthesized molecular recognition unit - heavy CDR1
FTFSSYSMS

SEQ ID NO: 148 - protein, 9 aa, Artificial Sequence
  Synthesized molecular recognition unit - heavy CDR1
FTFSSYTMN

SEQ ID NO: 149 - protein, 9 aa, Artificial Sequence
  Synthesized molecular recognition unit - heavy CDR1
FTFSSYTMS

SEQ ID NO: 150 - protein, 9 aa, Artificial Sequence
  Synthesized molecular recognition unit - heavy CDR1
FTFSSYVMS

SEQ ID NO: 151 - protein, 9 aa, Artificial Sequence
  Synthesized molecular recognition unit - heavy CDR1
FTFSSYWIH

SEQ ID NO: 152 - protein, 9 aa, Artificial Sequence
  Synthesized molecular recognition unit - heavy CDR1
FTFSSYWMH

SEQ ID NO: 153 - protein, 9 aa, Artificial Sequence
  Synthesized molecular recognition unit - heavy CDR1
FTFSSZZMH

SEQ ID NO: 154 - protein, 9 aa, Artificial Sequence
  Synthesized molecular recognition unit - heavy CDR1
  misc_feature (6)..(6): Xaa can be any naturally occurring amino acid
FTFSTXWMS

SEQ ID NO: 155 - protein, 9 aa, Artificial Sequence
  Synthesized molecular recognition unit - heavy CDR1
FTFSTYAMH

SEQ ID NO: 156 - protein, 9 aa, Artificial Sequence
  Synthesized molecular recognition unit - heavy CDR1
FTFSTYEMN

SEQ ID NO: 157 - protein, 9 aa, Artificial Sequence
  Synthesized molecular recognition unit - heavy CDR1
FTFSTYGMH

SEQ ID NO: 158 - protein, 9 aa, Artificial Sequence
  Synthesized molecular recognition unit - heavy CDR1
FTFSTYSMI

SEQ ID NO: 159 - protein, 9 aa, Artificial Sequence
  Synthesized molecular recognition unit - heavy CDR1
FTFSTYSMS

SEQ ID NO: 160 - protein, 9 aa, Artificial Sequence
  Synthesized molecular recognition unit - heavy CDR1
FTFTGSAVQ

SEQ ID NO: 161 - protein, 9 aa, Artificial Sequence
  Synthesized molecular recognition unit - heavy CDR1
FTFTNYAMS

SEQ ID NO: 162 - protein, 9 aa, Artificial Sequence
  Synthesized molecular recognition unit - heavy CDR1
FTFTSSAMQ

SEQ ID NO: 163 - protein, 9 aa, Artificial Sequence
  Synthesized molecular recognition unit - heavy CDR1
FTFTSSATQ

SEQ ID NO: 164 - protein, 9 aa, Artificial Sequence
  Synthesized molecular recognition unit - heavy CDR1
FTFTSSAVQ

SEQ ID NO: 165 - protein, 9 aa, Artificial Sequence
  Synthesized molecular recognition unit - heavy CDR1
FTFTSYAMH

SEQ ID NO: 166 - protein, 9 aa, Artificial Sequence
  Synthesized molecular recognition unit - heavy CDR1
FTFTZSAVQ

SEQ ID NO: 167 - protein, 9 aa, Artificial Sequence
  Synthesized molecular recognition unit - heavy CDR1
FTFZZSZVQ

SEQ ID NO: 168 - protein, 9 aa, Artificial Sequence
  Synthesized molecular recognition unit - heavy CDR1
FTLDYYAIS

SEQ ID NO: 169 - protein, 9 aa, Artificial Sequence
  Synthesized molecular recognition unit - heavy CDR1
FTLSSHHMN

SEQ ID NO: 170 - protein, 9 aa, Artificial Sequence
  Synthesized molecular recognition unit - heavy CDR1
FTLSTYNMN

SEQ ID NO: 171 - protein, 9 aa, Artificial Sequence
  Synthesized molecular recognition unit - heavy CDR1
FTVGNNYMS

SEQ ID NO: 172 - protein, 9 aa, Artificial Sequence
  Synthesized molecular recognition unit - heavy CDR1
FTVGSWYMS

SEQ ID NO: 173 - protein, 9 aa, Artificial Sequence
  Synthesized molecular recognition unit - heavy CDR1
FTVSSHSMG

SEQ ID NO: 174 - protein, 9 aa, Artificial Sequence
  Synthesized molecular recognition unit - heavy CDR1
FTVSSNYMN

SEQ ID NO: 175 - protein, 9 aa, Artificial Sequence
  Synthesized molecular recognition unit - heavy CDR1
FTVSSNYMS

SEQ ID NO: 176 - protein, 9 aa, Artificial Sequence
  Synthesized molecular recognition unit - heavy CDR1
FTZSSYDMH

SEQ ID NO: 177 - protein, 9 aa, Artificial Sequence
  Synthesized molecular recognition unit - heavy CDR1
FTZSSYSMN

SEQ ID NO: 178 - protein, 9 aa, Artificial Sequence
  Synthesized molecular recognition unit - heavy CDR1
GAFSTSSIS

SEQ ID NO: 179 - protein, 11 aa, Artificial Sequence
  Synthesized molecular recognition unit - heavy CDR1
GAISGTSYFWG

SEQ ID NO: 180 - protein, 9 aa, Artificial Sequence
  Synthesized molecular recognition unit - heavy CDR1
GDFTNYAMA

SEQ ID NO: 181 - protein, 9 aa, Artificial Sequence
  Synthesized molecular recognition unit - heavy CDR1
GFFSSFTMG

SEQ ID NO: 182 - protein, 8 aa, Artificial Sequence
  Synthesized molecular recognition unit - heavy CDR1
GFTFSDHY

SEQ ID NO: 183 - protein, 9 aa, Artificial Sequence
  Synthesized molecular recognition unit - heavy CDR1
GNFKNYGIT

SEQ ID NO: 184 - protein, 9 aa, Artificial Sequence
  Synthesized molecular recognition unit - heavy CDR1
GPFNLFAMG

SEQ ID NO: 185 - protein, 9 aa, Artificial Sequence
  Synthesized molecular recognition unit - heavy CDR1
GPFNLLAMG

SEQ ID NO: 186 - protein, 9 aa, Artificial Sequence
  Synthesized molecular recognition unit - heavy CDR1
GSFSGYAIN

SEQ ID NO: 187 - protein, 9 aa, Artificial Sequence
  Synthesized molecular recognition unit - heavy CDR1
GSFSGYAIS

SEQ ID NO: 188 - protein, 9 aa, Artificial Sequence
  Synthesized molecular recognition unit - heavy CDR1
GSFSGYYWH

SEQ ID NO: 189 - protein, 9 aa, Artificial Sequence
  Synthesized molecular recognition unit - heavy CDR1
GSFSGYYWS

SEQ ID NO: 190 - protein, 9 aa, Artificial Sequence
  Synthesized molecular recognition unit - heavy CDR1
GSFSNYAIS

SEQ ID NO: 191 - protein, 9 aa, Artificial Sequence
  Synthesized molecular recognition unit - heavy CDR1
GSFSTSVFG

SEQ ID NO: 192 - protein, 11 aa, Artificial Sequence
  Synthesized molecular recognition unit - heavy CDR1
GSISGNNYYWG

SEQ ID NO: 193 - protein, 11 aa, Artificial Sequence
  Synthesized molecular recognition unit - heavy CDR1
GSISGNNYYZG

SEQ ID NO: 194 - protein, 9 aa, Artificial Sequence
  Synthesized molecular recognition unit - heavy CDR1
GSISNYYWS

SEQ ID NO: 195 - protein, 11 aa, Artificial Sequence
  Synthesized molecular recognition unit - heavy CDR1
GSISSGGYSWS

SEQ ID NO: 196 - protein, 11 aa, Artificial Sequence
  Synthesized molecular recognition unit - heavy CDR1
GSISSGGYYWS

SEQ ID NO: 197 - protein, 11 aa, Artificial Sequence
  Synthesized molecular recognition unit - heavy CDR1
GSISSSSYYWG

SEQ ID NO: 198 - protein, 9 aa, Artificial Sequence
  Synthesized molecular recognition unit - heavy CDR1
GTFGNYGIN

SEQ ID NO: 199 - protein, 9 aa, Artificial Sequence
  Synthesized molecular recognition unit - heavy CDR1
GTFGSYAIT

SEQ ID NO: 200 - protein, 9 aa, Artificial Sequence
  Synthesized molecular recognition unit - heavy CDR1
GTFGSYAVG

SEQ ID NO: 201 - protein, 9 aa, Artificial Sequence
  Synthesized molecular recognition unit - heavy CDR1
GTFNRYAIT

SEQ ID NO: 202 - protein, 9 aa, Artificial Sequence
  Synthesized molecular recognition unit - heavy CDR1
GTFNRYGIS

SEQ ID NO: 203 - protein, 9 aa, Artificial Sequence
  Synthesized molecular recognition unit - heavy CDR1
GTFNSYAIA

SEQ ID NO: 204 - protein, 9 aa, Artificial Sequence
  Synthesized molecular recognition unit - heavy CDR1
GTFRSYAIN

SEQ ID NO: 205 - protein, 9 aa, Artificial Sequence
  Synthesized molecular recognition unit - heavy CDR1
GTFSSNVIS

SEQ ID NO: 206 - protein, 9 aa, Artificial Sequence
  Synthesized molecular recognition unit - heavy CDR1
GTFSSYAIN

SEQ ID NO: 207 - protein, 9 aa, Artificial Sequence
  Synthesized molecular recognition unit - heavy CDR1
GTFSSYAIS

SEQ ID NO: 208 - protein, 9 aa, Artificial Sequence
  Synthesized molecular recognition unit - heavy CDR1
GTFSSYTIS

SEQ ID NO: 209 - protein, 9 aa, Artificial Sequence
  Synthesized molecular recognition unit - heavy CDR1
GTFSSYVIS

SEQ ID NO: 210 - protein, 9 aa, Artificial Sequence
  Synthesized molecular recognition unit - heavy CDR1
GTFSTYAIS

SEQ ID NO: 211 - protein, 9 aa, Artificial Sequence
  Synthesized molecular recognition unit - heavy CDR1
GTFSTYAMG

SEQ ID NO: 212 - protein, 9 aa, Artificial Sequence
  Synthesized molecular recognition unit - heavy CDR1
GTFSZYAIS

SEQ ID NO: 213 - protein, 9 aa, Artificial Sequence
  Synthesized molecular recognition unit - heavy CDR1
GTFSZZTIS

SEQ ID NO: 214 - protein, 9 aa, Artificial Sequence
  Synthesized molecular recognition unit - heavy CDR1
GTFTNNFMH

SEQ ID NO: 215 - protein, 9 aa, Artificial Sequence
  Synthesized molecular recognition unit - heavy CDR1
GTFTRNSIS

SEQ ID NO: 216 - protein, 9 aa, Artificial Sequence
  Synthesized molecular recognition unit - heavy CDR1
GTFTSYAIS

SEQ ID NO: 217 - protein, 9 aa, Artificial Sequence
  Synthesized molecular recognition unit - heavy CDR1
GTFTSYPIS

SEQ ID NO: 218 - protein, 9 aa, Artificial Sequence
  Synthesized molecular recognition unit - heavy CDR1
GTFTYRYLH

SEQ ID NO: 219 - protein, 9 aa, Artificial Sequence
  Synthesized molecular recognition unit - heavy CDR1
GTLNNHTLS

SEQ ID NO: 220 - protein, 9 aa, Artificial Sequence
  Synthesized molecular recognition unit - heavy CDR1
GTSSTYAMG

SEQ ID NO: 221 - protein, 10 aa, Artificial Sequence
  Synthesized molecular recognition unit - heavy CDR1
HDFSSTYGVG

SEQ ID NO: 222 - protein, 9 aa, Artificial Sequence
  Synthesized molecular recognition unit - heavy CDR1
HTFSGYHIH

SEQ ID NO: 223 - protein, 9 aa, Artificial Sequence
  Synthesized molecular recognition unit - heavy CDR1
IIFSPNDMG

SEQ ID NO: 224 - protein, 11 aa, Artificial Sequence
  Synthesized molecular recognition unit - heavy CDR1
IKSMFDMNFMG

SEQ ID NO: 225 - protein, 9 aa, Artificial Sequence
  Synthesized molecular recognition unit - heavy CDR1
ITFGFDSVG

SEQ ID NO: 226 - protein, 9 aa, Artificial Sequence
  Synthesized molecular recognition unit - heavy CDR1
ITFSFNSVG

SEQ ID NO: 227 - protein, 9 aa, Artificial Sequence
  Synthesized molecular recognition unit - heavy CDR1
LAFNGYTMG

SEQ ID NO: 228 - protein, 9 aa, Artificial Sequence
  Synthesized molecular recognition unit - heavy CDR1
LAIDDYYMV

SEQ ID NO: 229 - protein, 9 aa, Artificial Sequence
  Synthesized molecular recognition unit - heavy CDR1
LTFSDYTVG

SEQ ID NO: 230 - protein, 9 aa, Artificial Sequence
  Synthesized molecular recognition unit - heavy CDR1
LTFSIYAMH

SEQ ID NO: 231 - protein, 9 aa, Artificial Sequence
  Synthesized molecular recognition unit - heavy CDR1
LTFSTYGMG

SEQ ID NO: 232 - protein, 9 aa, Artificial Sequence
  Synthesized molecular recognition unit - heavy CDR1
LTIDDYYMV

SEQ ID NO: 233 - protein, 9 aa, Artificial Sequence
  Synthesized molecular recognition unit - heavy CDR1
LTIDDYYVV

SEQ ID NO: 234 - protein, 9 aa, Artificial Sequence
  Synthesized molecular recognition unit - heavy CDR1
LTVSTNFMS

SEQ ID NO: 235 - protein, 9 aa, Artificial Sequence
  Synthesized molecular recognition unit - heavy CDR1
NFFSNYPLG

SEQ ID NO: 236 - protein, 9 aa, Artificial Sequence
  Synthesized molecular recognition unit - heavy CDR1
NIFRIYAIA

SEQ ID NO: 237 - protein, 9 aa, Artificial Sequence
  Synthesized molecular recognition unit - heavy CDR1
QTFTAYAMG

SEQ ID NO: 238 - protein, 9 aa, Artificial Sequence
  Synthesized molecular recognition unit - heavy CDR1
RAFSNYAMG

SEQ ID NO: 239 - protein, 9 aa, Artificial Sequence
  Synthesized molecular recognition unit - heavy CDR1
RAFTDNVMA

SEQ ID NO: 240 - protein, 9 aa, Artificial Sequence
  Synthesized molecular recognition unit - heavy CDR1
RIFSSYAQA

SEQ ID NO: 241 - protein, 9 aa, Artificial Sequence
  Synthesized molecular recognition unit - heavy CDR1
RMFSNYAMG

SEQ ID NO: 242 - protein, 9 aa, Artificial Sequence
  Synthesized molecular recognition unit - heavy CDR1
RRFTTYGMG

SEQ ID NO: 243 - protein, 9 aa, Artificial Sequence
  Synthesized molecular recognition unit - heavy CDR1
RSFRTNALG

SEQ ID NO: 244 - protein, 9 aa, Artificial Sequence
  Synthesized molecular recognition unit - heavy CDR1
RSFSIYNTA

SEQ ID NO: 245 - protein, 9 aa, Artificial Sequence
  Synthesized molecular recognition unit - heavy CDR1
RSFSNYRVA

SEQ ID NO: 246 - protein, 9 aa, Artificial Sequence
  Synthesized molecular recognition unit - heavy CDR1
RSFSTYPMG

SEQ ID NO: 247 - protein, 9 aa, Artificial Sequence
  Synthesized molecular recognition unit - heavy CDR1
RTDGGYVMG

SEQ ID NO: 248 - protein, 9 aa, Artificial Sequence
  Synthesized molecular recognition unit - heavy CDR1
RTDGMQAMG

SEQ ID NO: 249 - protein, 9 aa, Artificial Sequence
  Synthesized molecular recognition unit - heavy CDR1
RTFGSYAMG

SEQ ID NO: 250 - protein, 9 aa, Artificial Sequence
  Synthesized molecular recognition unit - heavy CDR1
RTFGTWAMG

SEQ ID NO: 251 - protein, 9 aa, Artificial Sequence
  Synthesized molecular recognition unit - heavy CDR1
RTFNRHVMG

SEQ ID NO: 252 - protein, 9 aa, Artificial Sequence
  Synthesized molecular recognition unit - heavy CDR1
RTFRAYAMG

SEQ ID NO: 253 - protein, 9 aa, Artificial Sequence
  Synthesized molecular recognition unit - heavy CDR1
RTFSEYAMG

SEQ ID NO: 254 - protein, 9 aa, Artificial Sequence
  Synthesized molecular recognition unit - heavy CDR1
RTFSNYVMG

SEQ ID NO: 255 - protein, 9 aa, Artificial Sequence
  Synthesized molecular recognition unit - heavy CDR1
RTFSSAAMG

SEQ ID NO: 256 - protein, 9 aa, Artificial Sequence
  Synthesized molecular recognition unit - heavy CDR1
RTFSSFVMG

SEQ ID NO: 257 - protein, 9 aa, Artificial Sequence
  Synthesized molecular recognition unit - heavy CDR1
RTFSSYAMG

SEQ ID NO: 258 - protein, 9 aa, Artificial Sequence
  Synthesized molecular recognition unit - heavy CDR1
RTFSSYSLA

SEQ ID NO: 259 - protein, 9 aa, Artificial Sequence
  Synthesized molecular recognition unit - heavy CDR1
RTFSTYGMG

SEQ ID NO: 260 - protein, 9 aa, Artificial Sequence
  Synthesized molecular recognition unit - heavy CDR1
RTFSWYSMG

SEQ ID NO: 261 - protein, 9 aa, Artificial Sequence
  Synthesized molecular recognition unit - heavy CDR1
RTLSSYVVG

SEQ ID NO: 262 - protein, 9 aa, Artificial Sequence
  Synthesized molecular recognition unit - heavy CDR1
RTSDLYTMG

SEQ ID NO: 263 - protein, 9 aa, Artificial Sequence
  Synthesized molecular recognition unit - heavy CDR1
RTSSSYAMG

SEQ ID NO: 264 - protein, 9 aa, Artificial Sequence
  Synthesized molecular recognition unit - heavy CDR1
RVFSSYAQA

SEQ ID NO: 265 - protein, 9 aa, Artificial Sequence
  Synthesized molecular recognition unit - heavy CDR1
SAFSNYAMG

SEQ ID NO: 266 - protein, 9 aa, Artificial Sequence
  Synthesized molecular recognition unit - heavy CDR1
SIDSINAMA

SEQ ID NO: 267 - protein, 9 aa, Artificial Sequence
  Synthesized molecular recognition unit - heavy CDR1
SIFSINAMG

SEQ ID NO: 268 - protein, 9 aa, Artificial Sequence
  Synthesized molecular recognition unit - heavy CDR1
SIFSIYAMG

SEQ ID NO: 269 - protein, 9 aa, Artificial Sequence
  Synthesized molecular recognition unit - heavy CDR1
SIFSSNTIY

SEQ ID NO: 270 - protein, 9 aa, Artificial Sequence
  Synthesized molecular recognition unit - heavy CDR1
SLFRLNGMG

SEQ ID NO: 271 - protein, 9 aa, Artificial Sequence
  Synthesized molecular recognition unit - heavy CDR1
STFSNYAMG

SEQ ID NO: 272 - protein, 9 aa, Artificial Sequence
  Synthesized molecular recognition unit - heavy CDR1
STFSTYAMG

SEQ ID NO: 273 - protein, 9 aa, Artificial Sequence
  Synthesized molecular recognition unit - heavy CDR1
STFTNAWMS

SEQ ID NO: 274 - protein, 9 aa, Artificial Sequence
  Synthesized molecular recognition unit - heavy CDR1
SVVNFVVMG

SEQ ID NO: 275 - protein, 9 aa, Artificial Sequence
  Synthesized molecular recognition unit - heavy CDR1
TTLNKYAIS

SEQ ID NO: 276 - protein, 9 aa, Artificial Sequence
  Synthesized molecular recognition unit - heavy CDR1
VSFSGYAMH

SEQ ID NO: 277 - protein, 9 aa, Artificial Sequence
  Synthesized molecular recognition unit - heavy CDR1
YDFTTYGIH

SEQ ID NO: 278 - protein, 9 aa, Artificial Sequence
  Synthesized molecular recognition unit - heavy CDR1
YIFTDYYMH

SEQ ID NO: 279 - protein, 9 aa, Artificial Sequence
  Synthesized molecular recognition unit - heavy CDR1
YIFTGYYMH

SEQ ID NO: 280 - protein, 9 aa, Artificial Sequence
  Synthesized molecular recognition unit - heavy CDR1
YSFTNYAMH

SEQ ID NO: 281 - protein, 9 aa, Artificial Sequence
  Synthesized molecular recognition unit - heavy CDR1
YSFTTYGMN

SEQ ID NO: 282 - protein, 9 aa, Artificial Sequence
  Synthesized molecular recognition unit - heavy CDR1
YTFASYDIH

SEQ ID NO: 283 - protein, 9 aa, Artificial Sequence
  Synthesized molecular recognition unit - heavy CDR1
YTFASYGMH

SEQ ID NO: 284 - protein, 9 aa, Artificial Sequence
  Synthesized molecular recognition unit - heavy CDR1
YTFSGYYLH

SEQ ID NO: 285 - protein, 9 aa, Artificial Sequence
  Synthesized molecular recognition unit - heavy CDR1
YTFTDYYMH

SEQ ID NO: 286 - protein, 9 aa, Artificial Sequence
  Synthesized molecular recognition unit - heavy CDR1
YTFTGHYIH

SEQ ID NO: 287 - protein, 9 aa, Artificial Sequence
  Synthesized molecular recognition unit - heavy CDR1
YTFTGHYMH

SEQ ID NO: 288 - protein, 9 aa, Artificial Sequence
  Synthesized molecular recognition unit - heavy CDR1
YTFTGYYMH

SEQ ID NO: 289 - protein, 9 aa, Artificial Sequence
  Synthesized molecular recognition unit - heavy CDR1
YTFTHSYIH

SEQ ID NO: 290 - protein, 9 aa, Artificial Sequence
  Synthesized molecular recognition unit - heavy CDR1
YTFTKDYMH

SEQ ID NO: 291 - protein, 9 aa, Artificial Sequence
  Synthesized molecular recognition unit - heavy CDR1
YTFTNHFMH

SEQ ID NO: 292 - protein, 9 aa, Artificial Sequence
  Synthesized molecular recognition unit - heavy CDR1
YTFTNNFMH

SEQ ID NO: 293 - protein, 9 aa, Artificial Sequence
  Synthesized molecular recognition unit - heavy CDR1
YTFTNYCTR

SEQ ID NO: 294 - protein, 9 aa, Artificial Sequence
  Synthesized molecular recognition unit - heavy CDR1
YTFTRYAVH

SEQ ID NO: 295 - protein, 9 aa, Artificial Sequence
  Synthesized molecular recognition unit - heavy CDR1
YTFTSHWMH

SEQ ID NO: 296 - protein, 9 aa, Artificial Sequence
  Synthesized molecular recognition unit - heavy CDR1
YTFTSSAIH

SEQ ID NO: 297 - protein, 9 aa, Artificial Sequence
  Synthesized molecular recognition unit - heavy CDR1
YTFTSYAIS

SEQ ID NO: 298 - protein, 9 aa, Artificial Sequence
  Synthesized molecular recognition unit - heavy CDR1
YTFTSYAMH

SEQ ID NO: 299 - protein, 9 aa, Artificial Sequence
  Synthesized molecular recognition unit - heavy CDR1
YTFTSYDIN

SEQ ID NO: 300 - protein, 9 aa, Artificial Sequence
  Synthesized molecular recognition unit - heavy CDR1
YTFTSYGIS

SEQ ID NO: 301 - protein, 9 aa, Artificial Sequence
  Synthesized molecular recognition unit - heavy CDR1
YTFTSYYMH

SEQ ID NO: 302 - protein, 9 aa, Artificial Sequence
  Synthesized molecular recognition unit - heavy CDR1
YTFTTYFMH

SEQ ID NO: 303 - protein, 9 aa, Artificial Sequence
  Synthesized molecular recognition unit - heavy CDR1
YTFTYRYLH

SEQ ID NO: 304 - protein, 9 aa, Artificial Sequence
  Synthesized molecular recognition unit - heavy CDR1
YTFTYYAMH

SEQ ID NO: 305 - protein, 9 aa, Artificial Sequence
  Synthesized molecular recognition unit - heavy CDR1
YTITTYAIH

SEQ ID NO: 306 - protein, 9 aa, Artificial Sequence
  Synthesized molecular recognition unit - heavy CDR1
YTLSNYGIS

SEQ ID NO: 307 - protein, 9 aa, Artificial Sequence
  Synthesized molecular recognition unit - heavy CDR1
  misc_feature (9)..(9): Xaa can be any naturally occurring amino acid
YTLTTWYMX

SEQ ID NO: 308 - protein, 9 aa, Artificial Sequence
  Synthesized molecular recognition unit - heavy CDR1
YTVTSYAMH

SEQ ID NO: 309 - protein, 9 aa, Artificial Sequence
  Synthesized molecular recognition unit - heavy CDR1
YZFZZZYMH

SEQ ID NO: 310 - protein, 9 aa, Artificial Sequence
  Synthesized molecular recognition unit - heavy CDR1
ZSVSSNYMS

SEQ ID NO: 311 - protein, 9 aa, Artificial Sequence
  Synthesized molecular recognition unit - heavy CDR1
ZTFSZYDMH

SEQ ID NO: 312 - protein, 9 aa, Artificial Sequence
  Synthesized molecular recognition unit - heavy CDR1
ZZZTDYYZQ

SEQ ID NO: 313 - protein, 17 aa, Artificial Sequence
  Synthesized molecular recognition unit - heavy CDR2
AAIGYKVKWNGERTYYL

SEQ ID NO: 314 - protein, 13 aa, Artificial Sequence
  Synthesized molecular recognition unit - heavy CDR2
AAINRSGGSTYYA

SEQ ID NO: 315 - protein, 13 aa, Artificial Sequence
  Synthesized molecular recognition unit - heavy CDR2
AAINWSGDSAYYA

SEQ ID NO: 316 - protein, 13 aa, Artificial Sequence
  Synthesized molecular recognition unit - heavy CDR2
AAINWSGRSTVYA

SEQ ID NO: 317 - protein, 13 aa, Artificial Sequence
  Synthesized molecular recognition unit - heavy CDR2
AAISGSGENTYYA

SEQ ID NO: 318 - protein, 13 aa, Artificial Sequence
  Synthesized molecular recognition unit - heavy CDR2
AAISRNGVYTRFA

SEQ ID NO: 319 - protein, 13 aa, Artificial Sequence
  Synthesized molecular recognition unit - heavy CDR2
AAISSGGSGTYYS

SEQ ID NO: 320 - protein, 13 aa, Artificial Sequence
  Synthesized molecular recognition unit - heavy CDR2
AAISWGGGSTFYS

SEQ ID NO: 321 - protein, 12 aa, Artificial Sequence
  Synthesized molecular recognition unit - heavy CDR2
AAISWMSNTYYA

SEQ ID NO: 322 - protein, 11 aa, Artificial Sequence
  Synthesized molecular recognition unit - heavy CDR2
AAISWRGTNIA

SEQ ID NO: 323 - protein, 12 aa, Artificial Sequence
  Synthesized molecular recognition unit - heavy CDR2
AAISWSDNTYYA

SEQ ID NO: 324 - protein, 13 aa, Artificial Sequence
  Synthesized molecular recognition unit - heavy CDR2
AAISWSGDSTYYA

SEQ ID NO: 325 - protein, 13 aa, Artificial Sequence
  Synthesized molecular recognition unit - heavy CDR2
AAISWSGDSTYYL

SEQ ID NO: 326 - protein, 13 aa, Artificial Sequence
  Synthesized molecular recognition unit - heavy CDR2
AAISWSGGSTHYA

SEQ ID NO: 327 - protein, 13 aa, Artificial Sequence
  Synthesized molecular recognition unit - heavy CDR2
AAISWSGGSTYYA

SEQ ID NO: 328 - protein, 13 aa, Artificial Sequence
  Synthesized molecular recognition unit - heavy CDR2
AAISWSGRSTYYA

SEQ ID NO: 329 - protein, 13 aa, Artificial Sequence
  Synthesized molecular recognition unit - heavy CDR2
AAISWSGSATHYA

SEQ ID NO: 330 - protein, 13 aa, Artificial Sequence
  Synthesized molecular recognition unit - heavy CDR2
AAISWSGSTAYYA

SEQ ID NO: 331 - protein, 13 aa, Artificial Sequence
  Synthesized molecular recognition unit - heavy CDR2
AAISWTGGSTYYA

SEQ ID NO: 332 - protein, 13 aa, Artificial Sequence
  Synthesized molecular recognition unit - heavy CDR2
AAISYDESNKFYA

SEQ ID NO: 333 - protein, 13 aa, Artificial Sequence
  Synthesized molecular recognition unit - heavy CDR2
AAISYNGFSTYYS

SEQ ID NO: 334 - protein, 12 aa, Artificial Sequence
  Synthesized molecular recognition unit - heavy CDR2
AAITSGGSTNYA

SEQ ID NO: 335 - protein, 13 aa, Artificial Sequence
  Synthesized molecular recognition unit - heavy CDR2
AAITWSGARTYYA

SEQ ID NO: 336 - protein, 12 aa, Artificial Sequence
  Synthesized molecular recognition unit - heavy CDR2
AALTGQRTTNYA

SEQ ID NO: 337 - protein, 12 aa, Artificial Sequence
  Synthesized molecular recognition unit - heavy CDR2
AALTSGGITYHA

SEQ ID NO: 338 - protein, 13 aa, Artificial Sequence
  Synthesized molecular recognition unit - heavy CDR2
AAVNWRGDGTYYS

SEQ ID NO: 339 - protein, 13 aa, Artificial Sequence
  Synthesized molecular recognition unit - heavy CDR2
AAVNWSGGSTYYA

SEQ ID NO: 340 - protein, 13 aa, Artificial Sequence
  Synthesized molecular recognition unit - heavy CDR2
AAVSASGANTYYA

SEQ ID NO: 341 - protein, 13 aa, Artificial Sequence
  Synthesized molecular recognition unit - heavy CDR2
AAVSASGGYTWYA

SEQ ID NO: 342 - protein, 13 aa, Artificial Sequence
  Synthesized molecular recognition unit - heavy CDR2
AAVSWSGVSTYYP

SEQ ID NO: 343 - protein, 13 aa, Artificial Sequence
  Synthesized molecular recognition unit - heavy CDR2
AAVTASGGYAWYA

SEQ ID NO: 344 - protein, 13 aa, Artificial Sequence
  Synthesized molecular recognition unit - heavy CDR2
AAVTWRAGSTYYA

SEQ ID NO: 345 - protein, 13 aa, Artificial Sequence
  Synthesized molecular recognition unit - heavy CDR2
AAVTWRSGSTYYA

SEQ ID NO: 346 - protein, 12 aa, Artificial Sequence
  Synthesized molecular recognition unit - heavy CDR2
ADITSGGSTNYA

SEQ ID NO: 347 - protein, 12 aa, Artificial Sequence
  Synthesized molecular recognition unit - heavy CDR2
AFITRGGTTRYG

SEQ ID NO: 348 - protein, 12 aa, Artificial Sequence
  Synthesized molecular recognition unit - heavy CDR2
AGIASDSTTFYA

SEQ ID NO: 349 - protein, 13 aa, Artificial Sequence
  Synthesized molecular recognition unit - heavy CDR2
AGIGWDSTNIGYA

SEQ ID NO: 350 - protein, 13 aa, Artificial Sequence
  Synthesized molecular recognition unit - heavy CDR2
AGINWNGGSVVYA

SEQ ID NO: 351 - protein, 13 aa, Artificial Sequence
  Synthesized molecular recognition unit - heavy CDR2
AGISASGGSTYYA

SEQ ID NO: 352 - protein, 13 aa, Artificial Sequence
  Synthesized molecular recognition unit - heavy CDR2
AGISGGGGSTDYA

SEQ ID NO: 353 - protein, 13 aa, Artificial Sequence
  Synthesized molecular recognition unit - heavy CDR2
AGISGSGKTTFYA

SEQ ID NO: 354 - protein, 13 aa, Artificial Sequence
  Synthesized molecular recognition unit - heavy CDR2
AGISRTGGNTGYA

SEQ ID NO: 355 - protein, 13 aa, Artificial Sequence
  Synthesized molecular recognition unit - heavy CDR2
AGISWNSGTIDYA

SEQ ID NO: 356 - protein, 13 aa, Artificial Sequence
  Synthesized molecular recognition unit - heavy CDR2
AGVSIDANKKYYA

SEQ ID NO: 357 - protein, 13 aa, Artificial Sequence
  Synthesized molecular recognition unit - heavy CDR2
AIVSYDGTYKYYS

SEQ ID NO: 358 - protein, 13 aa, Artificial Sequence
  Synthesized molecular recognition unit - heavy CDR2
ALISLSGASTYYA

SEQ ID NO: 359 - protein, 12 aa, Artificial Sequence
  Synthesized molecular recognition unit - heavy CDR2
ALISSGGSTSYA

SEQ ID NO: 360 - protein, 13 aa, Artificial Sequence
  Synthesized molecular recognition unit - heavy CDR2
ALISSNGDHKYYT

SEQ ID NO: 361 - protein, 13 aa, Artificial Sequence
  Synthesized molecular recognition unit - heavy CDR2
ALISYDGGNKYYA

SEQ ID NO: 362 - protein, 13 aa, Artificial Sequence
  Synthesized molecular recognition unit - heavy CDR2
ALISYDGGTKYYA

SEQ ID NO: 363 - protein, 13 aa, Artificial Sequence
  Synthesized molecular recognition unit - heavy CDR2
ALISYDGSHTYYA

SEQ ID NO: 364 - protein, 12 aa, Artificial Sequence
  Synthesized molecular recognition unit - heavy CDR2
ALITTSGNTNYA

SEQ ID NO: 365 - protein, 13 aa, Artificial Sequence
  Synthesized molecular recognition unit - heavy CDR2
ALMSPDGTIIYYA

SEQ ID NO: 366 - protein, 13 aa, Artificial Sequence
  Synthesized molecular recognition unit - heavy CDR2
ALTSYDGSKKFYA

SEQ ID NO: 367 - protein, 13 aa, Artificial Sequence
  Synthesized molecular recognition unit - heavy CDR2
ALVGYDGSQQFYG

SEQ ID NO: 368 - protein, 13 aa, Artificial Sequence
  Synthesized molecular recognition unit - heavy CDR2
ANIKQDGSEKYYV

SEQ ID NO: 369 - protein, 13 aa, Artificial Sequence
  Synthesized molecular recognition unit - heavy CDR2
AQISWTGGSTDYA

SEQ ID NO: 370 - protein, 12 aa, Artificial Sequence
  Synthesized molecular recognition unit - heavy CDR2
ASIPSDGTTFYA

SEQ ID NO: 371 - protein, 13 aa, Artificial Sequence
  Synthesized molecular recognition unit - heavy CDR2
ASITWNGRYTYYA

SEQ ID NO: 372 - protein, 13 aa, Artificial Sequence
  Synthesized molecular recognition unit - heavy CDR2
ASIWFDGSNQDYA

SEQ ID NO: 373 - protein, 13 aa, Artificial Sequence
  Synthesized molecular recognition unit - heavy CDR2
ASSTGGGVFENYA

SEQ ID NO: 374 - protein, 12 aa, Artificial Sequence
  Synthesized molecular recognition unit - heavy CDR2
ATIQSGGRTNYA

SEQ ID NO: 375 - protein, 13 aa, Artificial Sequence
  Synthesized molecular recognition unit - heavy CDR2
ATISGGGGSTFDD

SEQ ID NO: 376 - protein, 12 aa, Artificial Sequence
  Synthesized molecular recognition unit - heavy CDR2
ATISTRGTTHYA

SEQ ID NO: 377 - protein, 11 aa, Artificial Sequence
  Synthesized molecular recognition unit - heavy CDR2
ATISWGGTNIA

SEQ ID NO: 378 - protein, 13 aa, Artificial Sequence
  Synthesized molecular recognition unit - heavy CDR2
ATVTWRTGTTYYA

SEQ ID NO: 379 - protein, 12 aa, Artificial Sequence
  Synthesized molecular recognition unit - heavy CDR2
AVFIAGYGAYYA

SEQ ID NO: 380 - protein, 12 aa, Artificial Sequence
  Synthesized molecular recognition unit - heavy CDR2
AVFNAGYRAYYA

SEQ ID NO: 381 - protein, 13 aa, Artificial Sequence
  Synthesized molecular recognition unit - heavy CDR2
AVISRSGGNTYYT

SEQ ID NO: 382 - protein, 13 aa, Artificial Sequence
  Synthesized molecular recognition unit - heavy CDR2
AVISSDGNNKYYT

SEQ ID NO: 383 - protein, 13 aa, Artificial Sequence
  Synthesized molecular recognition unit - heavy CDR2
AVISYDGSNEYYA

SEQ ID NO: 384 - protein, 13 aa, Artificial Sequence
  Synthesized molecular recognition unit - heavy CDR2
AVISYDGSNKYYA

SEQ ID NO: 385 - protein, 13 aa, Artificial Sequence
  Synthesized molecular recognition unit - heavy CDR2
AVISYDGSNRZYA

SEQ ID NO: 386 - protein, 13 aa, Artificial Sequence
  Synthesized molecular recognition unit - heavy CDR2
AVITSGGTFKYYA

SEQ ID NO: 387 - protein, 12 aa, Artificial Sequence
  Synthesized molecular recognition unit - heavy CDR2
AVMYSGGTTYYA

SEQ ID NO: 388 - protein, 12 aa, Artificial Sequence
  Synthesized molecular recognition unit - heavy CDR2
AVSWSVGMTYYA

SEQ ID NO: 389 - protein, 13 aa, Artificial Sequence
  Synthesized molecular recognition unit - heavy CDR2
AVTWYDGSNKYYA

SEQ ID NO: 390 - protein, 12 aa, Artificial Sequence
  Synthesized molecular recognition unit - heavy CDR2
AVVATGGATNYA

SEQ ID NO: 391 - protein, 13 aa, Artificial Sequence
  Synthesized molecular recognition unit - heavy CDR2
AYINSGSSEMNYA

SEQ ID NO: 392 - protein, 13 aa, Artificial Sequence
  Synthesized molecular recognition unit - heavy CDR2
AYINSRGSLMYYA

SEQ ID NO: 393 - protein, 13 aa, Artificial Sequence
  Synthesized molecular recognition unit - heavy CDR2
GAISRTGSGTFYA

SEQ ID NO: 394 - protein, 13 aa, Artificial Sequence
  Synthesized molecular recognition unit - heavy CDR2
GAITWSLGIAFYA

SEQ ID NO: 395 - protein, 13 aa, Artificial Sequence
  Synthesized molecular recognition unit - heavy CDR2
GAITWSLGSAFYA

SEQ ID NO: 396 - protein, 12 aa, Artificial Sequence
  Synthesized molecular recognition unit - heavy CDR2
GEIDHTGSTNYE

SEQ ID NO: 397 - protein, 12 aa, Artificial Sequence
  Synthesized molecular recognition unit - heavy CDR2
GEIDRSGDTNYN

SEQ ID NO: 398 - protein, 12 aa, Artificial Sequence
  Synthesized molecular recognition unit - heavy CDR2
GEINHSGSTNYN

SEQ ID NO: 399 - protein, 15 aa, Artificial Sequence
  Synthesized molecular recognition unit - heavy CDR2
GFIRSKAYGGTTEYA

SEQ ID NO: 400 - protein, 15 aa, Artificial Sequence
  Synthesized molecular recognition unit - heavy CDR2
GFIRSKDYGGTTEYA

SEQ ID NO: 401 - protein, 13 aa, Artificial Sequence
  Synthesized molecular recognition unit - heavy CDR2
GGFDPEDGETIYA

SEQ ID NO: 402 - protein, 13 aa, Artificial Sequence
  Synthesized molecular recognition unit - heavy CDR2
GGIFPIFGTANYA

SEQ ID NO: 403 - protein, 13 aa, Artificial Sequence
  Synthesized molecular recognition unit - heavy CDR2
GGIFPIYGISTYA

SEQ ID NO: 404 - protein, 13 aa, Artificial Sequence
  Synthesized molecular recognition unit - heavy CDR2
GGIIPFFNTVNYA

SEQ ID NO: 405 - protein, 13 aa, Artificial Sequence
  Synthesized molecular recognition unit - heavy CDR2
GGIIPIFGIANYA

SEQ ID NO: 406 - protein, 13 aa, Artificial Sequence
  Synthesized molecular recognition unit - heavy CDR2
GGIIPIFGTAKYA

SEQ ID NO: 407 - protein, 13 aa, Artificial Sequence
  Synthesized molecular recognition unit - heavy CDR2
GGIIPIFGTANHA

SEQ ID NO: 408 - protein, 13 aa, Artificial Sequence
  Synthesized molecular recognition unit - heavy CDR2
GGIIPIFGTANYA

SEQ ID NO: 409 - protein, 13 aa, Artificial Sequence
  Synthesized molecular recognition unit - heavy CDR2
GGIIPIFGTAZYA

SEQ ID NO: 410 - protein, 13 aa, Artificial Sequence
  Synthesized molecular recognition unit - heavy CDR2
GGIIPIFGTGNYA

SEQ ID NO: 411 - protein, 13 aa, Artificial Sequence
  Synthesized molecular recognition unit - heavy CDR2
GGIIPIFGTPHYA

SEQ ID NO: 412 - protein, 13 aa, Artificial Sequence
  Synthesized molecular recognition unit - heavy CDR2
GGIIPIFGTTNYA

SEQ ID NO: 413 - protein, 13 aa, Artificial Sequence
  Synthesized molecular recognition unit - heavy CDR2
GGIIPILGIANYA

SEQ ID NO: 414 - protein, 13 aa, Artificial Sequence
  Synthesized molecular recognition unit - heavy CDR2
GGIIPISGKTDYA

SEQ ID NO: 415 - protein, 13 aa, Artificial Sequence
  Synthesized molecular recognition unit - heavy CDR2
GGIIPLFGTANYA

SEQ ID NO: 416 - protein, 13 aa, Artificial Sequence
  Synthesized molecular recognition unit - heavy CDR2
GGIIPLFGTTDYA

SEQ ID NO: 417 - protein, 13 aa, Artificial Sequence
  Synthesized molecular recognition unit - heavy CDR2
GGIIPRLGATDYA

SEQ ID NO: 418 - protein, 13 aa, Artificial Sequence
  Synthesized molecular recognition unit - heavy CDR2
GGILPIYGTTKYA

SEQ ID NO: 419 - protein, 13 aa, Artificial Sequence
  Synthesized molecular recognition unit - heavy CDR2
GGMNZNRGNTGYA

SEQ ID NO: 420 - protein, 13 aa, Artificial Sequence
  Synthesized molecular recognition unit - heavy CDR2
GGVIPAFGATDYS

SEQ ID NO: 421 - protein, 13 aa, Artificial Sequence
  Synthesized molecular recognition unit - heavy CDR2
GIINPSGGRTTYA

SEQ ID NO: 422 - protein, 13 aa, Artificial Sequence
  Synthesized molecular recognition unit - heavy CDR2
GIINPSGGSTSYA

SEQ ID NO: 423 - protein, 13 aa, Artificial Sequence
  Synthesized molecular recognition unit - heavy CDR2
GIINPSSGRTDYA

SEQ ID NO: 424 - protein, 13 aa, Artificial Sequence
  Synthesized molecular recognition unit - heavy CDR2
GIISPGGGRTIYA

SEQ ID NO: 425 - protein, 13 aa, Artificial Sequence
  Synthesized molecular recognition unit - heavy CDR2
GIISPSGGSTSYA

SEQ ID NO: 426 - protein, 13 aa, Artificial Sequence
  Synthesized molecular recognition unit - heavy CDR2
GIIZPGGGRTIYA

SEQ ID NO: 427 - protein, 13 aa, Artificial Sequence
  Synthesized molecular recognition unit - heavy CDR2
GLISRNAGNTLYA

SEQ ID NO: 428 - protein, 13 aa, Artificial Sequence
  Synthesized molecular recognition unit - heavy CDR2
GLVCPSDGSTSYA

SEQ ID NO: 429 - protein, 13 aa, Artificial Sequence
  Synthesized molecular recognition unit - heavy CDR2
GLVDPEDGETIYA

SEQ ID NO: 430 - protein, 13 aa, Artificial Sequence
  Synthesized molecular recognition unit - heavy CDR2
GMIIPFLGITNYA

SEQ ID NO: 431 - protein, 13 aa, Artificial Sequence
  Synthesized molecular recognition unit - heavy CDR2
GMINPIGGSINYA

SEQ ID NO: 432 - protein, 13 aa, Artificial Sequence
  Synthesized molecular recognition unit - heavy CDR2
GMINPSGGSTTYA

SEQ ID NO: 433 - protein, 14 aa, Artificial Sequence
  Synthesized molecular recognition unit - heavy CDR2
GRAYYKSRWYYDYA

SEQ ID NO: 434 - protein, 13 aa, Artificial Sequence
  Synthesized molecular recognition unit - heavy CDR2
GRIIPALGTANYA

SEQ ID NO: 435 - protein, 13 aa, Artificial Sequence
  Synthesized molecular recognition unit - heavy CDR2
GRIIPIFGTANYA

SEQ ID NO: 436 - protein, 13 aa, Artificial Sequence
  Synthesized molecular recognition unit - heavy CDR2
GRIIPIFGTAZYA

SEQ ID NO: 437 - protein, 13 aa, Artificial Sequence
  Synthesized molecular recognition unit - heavy CDR2
GRIIPIFGTVNYA

SEQ ID NO: 438 - protein, 13 aa, Artificial Sequence
  Synthesized molecular recognition unit - heavy CDR2
GRIIPILGIANYA

SEQ ID NO: 439 - protein, 13 aa, Artificial Sequence
  Synthesized molecular recognition unit - heavy CDR2
GRIIPILGSANYA

SEQ ID NO: 440 - protein, 13 aa, Artificial Sequence
  Synthesized molecular recognition unit - heavy CDR2
GRIIPILGTPNYA

SEQ ID NO: 441 - protein, 13 aa, Artificial Sequence
  Synthesized molecular recognition unit - heavy CDR2
GRIIPLFGTTNYA

SEQ ID NO: 442 - protein, 13 aa, Artificial Sequence
  Synthesized molecular recognition unit - heavy CDR2
GRIIPTVGTANYA

SEQ ID NO: 443 - protein, 13 aa, Artificial Sequence
  Synthesized molecular recognition unit - heavy CDR2
GRIIPVLGTANYA

SEQ ID NO: 444 - protein, 15 aa, Artificial Sequence
  Synthesized molecular recognition unit - heavy CDR2
GRIKSKANGGTTDYA

SEQ ID NO: 445 - protein, 15 aa, Artificial Sequence
  Synthesized molecular recognition unit - heavy CDR2
GRIKSKAYGGTTEYA

SEQ ID NO: 446 - protein, 13 aa, Artificial Sequence
  Synthesized molecular recognition unit - heavy CDR2
GRINPNSGGTNYA

SEQ ID NO: 447 - protein, 13 aa, Artificial Sequence
  Synthesized molecular recognition unit - heavy CDR2
GRISAYNGYKSYA

SEQ ID NO: 448 - protein, 13 aa, Artificial Sequence
  Synthesized molecular recognition unit - heavy CDR2
GRITPVVGVTNYA

SEQ ID NO: 449 - protein, 13 aa, Artificial Sequence
  Synthesized molecular recognition unit - heavy CDR2
GRIVPAIGFTQYA

SEQ ID NO: 450 - protein, 13 aa, Artificial Sequence
  Synthesized molecular recognition unit - heavy CDR2
GRIVPIVDVVKYA

SEQ ID NO: 451 - protein, 14 aa, Artificial Sequence
  Synthesized molecular recognition unit - heavy CDR2
GRTYYRSKWYNDYA

SEQ ID NO: 452 - protein, 14 aa, Artificial Sequence
  Synthesized molecular recognition unit - heavy CDR2
GRTYYRSKYYNGYA

SEQ ID NO: 453 - protein, 13 aa, Artificial Sequence
  Synthesized molecular recognition unit - heavy CDR2
GRVIPILGVTNYA

SEQ ID NO: 454 - protein, 12 aa, Artificial Sequence
  Synthesized molecular recognition unit - heavy CDR2
GSIYFTGGTYYN

SEQ ID NO: 455 - protein, 12 aa, Artificial Sequence
  Synthesized molecular recognition unit - heavy CDR2
GSIYYTGNTYYN

SEQ ID NO: 456 - protein, 13 aa, Artificial Sequence
  Synthesized molecular recognition unit - heavy CDR2
GTVTPILGTANYA

SEQ ID NO: 457 - protein, 13 aa, Artificial Sequence
  Synthesized molecular recognition unit - heavy CDR2
GVIDPSTGGTNYA

SEQ ID NO: 458 - protein, 13 aa, Artificial Sequence
  Synthesized molecular recognition unit - heavy CDR2
GVIFPVYPTPDYA

SEQ ID NO: 459 - protein, 13 aa, Artificial Sequence
  Synthesized molecular recognition unit - heavy CDR2
GVINPGSGGTSYN

SEQ ID NO: 460 - protein, 13 aa, Artificial Sequence
  Synthesized molecular recognition unit - heavy CDR2
GVISKDGDNKYYA

SEQ ID NO: 461 - protein, 13 aa, Artificial Sequence
  Synthesized molecular recognition unit - heavy CDR2
GWIGPHNGNTNYA

SEQ ID NO: 462 - protein, 13 aa, Artificial Sequence
  Synthesized molecular recognition unit - heavy CDR2
GWINADTGDTAYS

SEQ ID NO: 463 - protein, 13 aa, Artificial Sequence
  Synthesized molecular recognition unit - heavy CDR2
GWINAGNGNTKYA

SEQ ID NO: 464 - protein, 13 aa, Artificial Sequence
  Synthesized molecular recognition unit - heavy CDR2
GWINAGNGNTKYS

SEQ ID NO: 465 - protein, 13 aa, Artificial Sequence
  Synthesized molecular recognition unit - heavy CDR2
GWINAGNGNTTYA

SEQ ID NO: 466 - protein, 13 aa, Artificial Sequence
  Synthesized molecular recognition unit - heavy CDR2
GWINAKSGGTFYA

SEQ ID NO: 467 - protein, 13 aa, Artificial Sequence
  Synthesized molecular recognition unit - heavy CDR2
GWINPKSGGTNYA

SEQ ID NO: 468 - protein, 13 aa, Artificial Sequence
  Synthesized molecular recognition unit - heavy CDR2
GWINPNSGDTKFA

SEQ ID NO: 469 - protein, 13 aa, Artificial Sequence
  Synthesized molecular recognition unit - heavy CDR2
GWINPNSGGTIYA

SEQ ID NO: 470 - protein, 13 aa, Artificial Sequence
  Synthesized molecular recognition unit - heavy CDR2
GWINPNSGGTKYA

SEQ ID NO: 471 - protein, 13 aa, Artificial Sequence
  Synthesized molecular recognition unit - heavy CDR2
GWINPNSGGTNYA

SEQ ID NO: 472 - protein, 13 aa, Artificial Sequence
  Synthesized molecular recognition unit - heavy CDR2
GWINSGNGNTKYS

SEQ ID NO: 473 - protein, 13 aa, Artificial Sequence
  Synthesized molecular recognition unit - heavy CDR2
GWINTYNGNTIYA

SEQ ID NO: 474 - protein, 13 aa, Artificial Sequence
  Synthesized molecular recognition unit - heavy CDR2
GWINTYNGNTNYP

SEQ ID NO: 475 - protein, 13 aa, Artificial Sequence
  Synthesized molecular recognition unit - heavy CDR2
GWISAYNGDTKYA

SEQ ID NO: 476 - protein, 13 aa, Artificial Sequence
  Synthesized molecular recognition unit - heavy CDR2
GWISAYNGHTNYA

SEQ ID NO: 477 - protein, 13 aa, Artificial Sequence
  Synthesized molecular recognition unit - heavy CDR2
GWISAYNGNTNYA

SEQ ID NO: 478 - protein, 13 aa, Artificial Sequence
  Synthesized molecular recognition unit - heavy CDR2
GWISPNRGGTNYA

SEQ ID NO: 479 - protein, 13 aa, Artificial Sequence
  Synthesized molecular recognition unit - heavy CDR2
GWISPYNGNTKYA

SEQ ID NO: 480 - protein, 13 aa, Artificial Sequence
  Synthesized molecular recognition unit - heavy CDR2
GWISPYNGNTNYA

SEQ ID NO: 481 - protein, 13 aa, Artificial Sequence
  Synthesized molecular recognition unit - heavy CDR2
GWISPYNGYTKYA

SEQ ID NO: 482 - protein, 13 aa, Artificial Sequence
  Synthesized molecular recognition unit - heavy CDR2
GWISSFNGNTKYA

SEQ ID NO: 483 - protein, 13 aa, Artificial Sequence
  Synthesized molecular recognition unit - heavy CDR2
GWISTFNDNTNYA

SEQ ID NO: 484 - protein, 13 aa, Artificial Sequence
  Synthesized molecular recognition unit - heavy CDR2
GWISTYNGATNYA

SEQ ID NO: 485 - protein, 13 aa, Artificial Sequence
  Synthesized molecular recognition unit - heavy CDR2
GWIYPNSGGTKYA

SEQ ID NO: 486 - protein, 13 aa, Artificial Sequence
  Synthesized molecular recognition unit - heavy CDR2
GWMNPDSGKTGYA

SEQ ID NO: 487 - protein, 13 aa, Artificial Sequence
  Synthesized molecular recognition unit - heavy CDR2
GWMNPISGNTGYA

SEQ ID NO: 488 - protein, 13 aa, Artificial Sequence
  Synthesized molecular recognition unit - heavy CDR2
GWMNPNNGNTTYA

SEQ ID NO: 489 - protein, 13 aa, Artificial Sequence
  Synthesized molecular recognition unit - heavy CDR2
GWMNPNSGNTAYA

SEQ ID NO: 490 - protein, 13 aa, Artificial Sequence
  Synthesized molecular recognition unit - heavy CDR2
GWMNPNSGNTGYA

SEQ ID NO: 491 - protein, 13 aa, Artificial Sequence
  Synthesized molecular recognition unit - heavy CDR2
GWMSPNSGNAGFA

SEQ ID NO: 492 - protein, 13 aa, Artificial Sequence
  Synthesized molecular recognition unit - heavy CDR2
GWMSPSSGNAGYA

SEQ ID NO: 493 - protein, 13 aa, Artificial Sequence
  Synthesized molecular recognition unit - heavy CDR2
GWVNPTTGNTGYA

SEQ ID NO: 494 - protein, 13 aa, Artificial Sequence
  Synthesized molecular recognition unit - heavy CDR2
GWVSPNTGNTVYA

SEQ ID NO: 495 - protein, 13 aa, Artificial Sequence
  Synthesized molecular recognition unit - heavy CDR2
GWVSPSSGNTAYA

SEQ ID NO: 496 - protein, 12 aa, Artificial Sequence
  Synthesized molecular recognition unit - heavy CDR2
GYIYYSGSTYYN

SEQ ID NO: 497 - protein, 12 aa, Artificial Sequence
  Synthesized molecular recognition unit - heavy CDR2
PRIPSDSTTFYA

SEQ ID NO: 498 - protein, 12 aa, Artificial Sequence
  Synthesized molecular recognition unit - heavy CDR2
SAIDGAGRTYYT

SEQ ID NO: 499 - protein, 13 aa, Artificial Sequence
  Synthesized molecular recognition unit - heavy CDR2
SAIDGSGGSTYYA

SEQ ID NO: 500 - protein, 12 aa, Artificial Sequence
  Synthesized molecular recognition unit - heavy CDR2
SAIGAGGGTYYA

SEQ ID NO: 501 - protein, 12 aa, Artificial Sequence
  Synthesized molecular recognition unit - heavy CDR2
SAIGTGGDTYYA

SEQ ID NO: 502 - protein, 12 aa, Artificial Sequence
  Synthesized molecular recognition unit - heavy CDR2
SAIGTGGGTYYA

SEQ ID NO: 503 - protein, 13 aa, Artificial Sequence
  Synthesized molecular recognition unit - heavy CDR2
SAISASGDSTFYA

SEQ ID NO: 504 - protein, 13 aa, Artificial Sequence
  Synthesized molecular recognition unit - heavy CDR2
SAISGDGALTYYA

SEQ ID NO: 505 - protein, 13 aa, Artificial Sequence
  Synthesized molecular recognition unit - heavy CDR2
SAISGSGATTTYA

SEQ ID NO: 506 - protein, 12 aa, Artificial Sequence
  Synthesized molecular recognition unit - heavy CDR2
SAISGSGFTYYA

SEQ ID NO: 507 - protein, 13 aa, Artificial Sequence
  Synthesized molecular recognition unit - heavy CDR2
SAISGSGGSTYYA

SEQ ID NO: 508 - protein, 13 aa, Artificial Sequence
  Synthesized molecular recognition unit - heavy CDR2
SAISNSGGSTYYA

SEQ ID NO: 509 - protein, 13 aa, Artificial Sequence
  Synthesized molecular recognition unit - heavy CDR2
SAISVSGGTTFYA

SEQ ID NO: 510 - protein, 13 aa, Artificial Sequence
  Synthesized molecular recognition unit - heavy CDR2
SAISWSGGSTYYA

SEQ ID NO: 511 - protein, 13 aa, Artificial Sequence
  Synthesized molecular recognition unit - heavy CDR2
SAVSGNGGGTFYA

SEQ ID NO: 512 - protein, 12 aa, Artificial Sequence
  Synthesized molecular recognition unit - heavy CDR2
SGIGVGGGTYYA

SEQ ID NO: 513 - protein, 13 aa, Artificial Sequence
  Synthesized molecular recognition unit - heavy CDR2
SGINWNGGSTGYA

SEQ ID NO: 514 - protein, 13 aa, Artificial Sequence
  Synthesized molecular recognition unit - heavy CDR2
SGINWNSAKIGYV

SEQ ID NO: 515 - protein, 13 aa, Artificial Sequence
  Synthesized molecular recognition unit - heavy CDR2
SGISGSGGSTYYA

SEQ ID NO: 516 - protein, 13 aa, Artificial Sequence
  Synthesized molecular recognition unit - heavy CDR2
SGISGSGGTTYYA

SEQ ID NO: 517 - protein, 13 aa, Artificial Sequence
  Synthesized molecular recognition unit - heavy CDR2
SGISGSGRSTYYA

SEQ ID NO: 518 - protein, 13 aa, Artificial Sequence
  Synthesized molecular recognition unit - heavy CDR2
SGISGSGSSTYYA

SEQ ID NO: 519 - protein, 13 aa, Artificial Sequence
  Synthesized molecular recognition unit - heavy CDR2
SGISGSGTTTYYR

SEQ ID NO: 520 - protein, 13 aa, Artificial Sequence
  Synthesized molecular recognition unit - heavy CDR2
SGISRDGGRTSYS

SEQ ID NO: 521 - protein, 13 aa, Artificial Sequence
  Synthesized molecular recognition unit - heavy CDR2
SGISWNSGNIGYA

SEQ ID NO: 522 - protein, 13 aa, Artificial Sequence
  Synthesized molecular recognition unit - heavy CDR2
SGISWNSGSIGYA

SEQ ID NO: 523 - protein, 13 aa, Artificial Sequence
  Synthesized molecular recognition unit - heavy CDR2
SGITGSGGRTFYA

SEQ ID NO: 524 - protein, 13 aa, Artificial Sequence
  Synthesized molecular recognition unit - heavy CDR2
SGVGGSGGSTZYA

SEQ ID NO: 525 - protein, 13 aa, Artificial Sequence
  Synthesized molecular recognition unit - heavy CDR2
SGVSWNGSRTHYV

SEQ ID NO: 526 - protein, 13 aa, Artificial Sequence
  Synthesized molecular recognition unit - heavy CDR2
SHISSGGATIDYA

SEQ ID NO: 527 - protein, 13 aa, Artificial Sequence
  Synthesized molecular recognition unit - heavy CDR2
SLISGSGDNTNYA

SEQ ID NO: 528 - protein, 13 aa, Artificial Sequence
  Synthesized molecular recognition unit - heavy CDR2
SLVSFDGSKEHYA

SEQ ID NO: 529 - protein, 13 aa, Artificial Sequence
  Synthesized molecular recognition unit - heavy CDR2
SRIDTDGSTTVYA

SEQ ID NO: 530 - protein, 13 aa, Artificial Sequence
  Synthesized molecular recognition unit - heavy CDR2
SRINGDGSNTNYA

SEQ ID NO: 531 - protein, 13 aa, Artificial Sequence
  Synthesized molecular recognition unit - heavy CDR2
SRINGDGSSTRYA

SEQ ID NO: 532 - protein, 13 aa, Artificial Sequence
  Synthesized molecular recognition unit - heavy CDR2
SRINSDGSTISYA

SEQ ID NO: 533 - protein, 13 aa, Artificial Sequence
  Synthesized molecular recognition unit - heavy CDR2
SRINYDGSATTYA

SEQ ID NO: 534 - protein, 13 aa, Artificial Sequence
  Synthesized molecular recognition unit - heavy CDR2
SRISNSGSLVYYA

SEQ ID NO: 535 - protein, 13 aa, Artificial Sequence
  Synthesized molecular recognition unit - heavy CDR2
SRISPDGRTTTYA

SEQ ID NO: 536 - protein, 13 aa, Artificial Sequence
  Synthesized molecular recognition unit - heavy CDR2
SSIDGNGDHVFYA

SEQ ID NO: 537 - protein, 13 aa, Artificial Sequence
  Synthesized molecular recognition unit - heavy CDR2
SSINNSSRTVFYA

SEQ ID NO: 538 - protein, 13 aa, Artificial Sequence
  Synthesized molecular recognition unit - heavy CDR2
SSISAAGAYKYYA

SEQ ID NO: 539 - protein, 13 aa, Artificial Sequence
  Synthesized molecular recognition unit - heavy CDR2
SSISGGGRHTYYA

SEQ ID NO: 540 - protein, 13 aa, Artificial Sequence
  Synthesized molecular recognition unit - heavy CDR2
SSISGLGGSTYZA

SEQ ID NO: 541 - protein, 13 aa, Artificial Sequence
  Synthesized molecular recognition unit - heavy CDR2
SSISSGNSYIYYA

SEQ ID NO: 542 - protein, 13 aa, Artificial Sequence
  Synthesized molecular recognition unit - heavy CDR2
SSISSSSHYKYYA

SEQ ID NO: 543 - protein, 13 aa, Artificial Sequence
  Synthesized molecular recognition unit - heavy CDR2
SSISSSSSYIYYA

SEQ ID NO: 544 - protein, 13 aa, Artificial Sequence
  Synthesized molecular recognition unit - heavy CDR2
SSISTSGGSTYYA

SEQ ID NO: 545 - protein, 13 aa, Artificial Sequence
  Synthesized molecular recognition unit - heavy CDR2
SSISWNSGRVDYA

SEQ ID NO: 546 - protein, 15 aa, Artificial Sequence
  Synthesized molecular recognition unit - heavy CDR2
SSITRTPSGGTTEYA

SEQ ID NO: 547 - protein, 11 aa, Artificial Sequence
  Synthesized molecular recognition unit - heavy CDR2
SSITTTSTLYA

SEQ ID NO: 548 - protein, 13 aa, Artificial Sequence
  Synthesized molecular recognition unit - heavy CDR2
SSLSWNSGTIVYA

SEQ ID NO: 549 - protein, 13 aa, Artificial Sequence
  Synthesized molecular recognition unit - heavy CDR2
SSTSGSGGNSKYS

SEQ ID NO: 550 - protein, 13 aa, Artificial Sequence
  Synthesized molecular recognition unit - heavy CDR2
STIAGSGGRTYYS

SEQ ID NO: 551 - protein, 12 aa, Artificial Sequence
  Synthesized molecular recognition unit - heavy CDR2
STIGPAGDTYYP

SEQ ID NO: 552 - protein, 12 aa, Artificial Sequence
  Synthesized molecular recognition unit - heavy CDR2
STIGTGGGTYYA

SEQ ID NO: 553 - protein, 13 aa, Artificial Sequence
  Synthesized molecular recognition unit - heavy CDR2
STISGGGGSTYYA

SEQ ID NO: 554 - protein, 13 aa, Artificial Sequence
  Synthesized molecular recognition unit - heavy CDR2
STISGSGGSTYYS

SEQ ID NO: 555 - protein, 13 aa, Artificial Sequence
  Synthesized molecular recognition unit - heavy CDR2
STISGSGVSTFYA

SEQ ID NO: 556 - protein, 13 aa, Artificial Sequence
  Synthesized molecular recognition unit - heavy CDR2
STISPSGLYIYQA

SEQ ID NO: 557 - protein, 13 aa, Artificial Sequence
  Synthesized molecular recognition unit - heavy CDR2
STISSSGGRTFYA

SEQ ID NO: 558 - protein, 12 aa, Artificial Sequence
  Synthesized molecular recognition unit - heavy CDR2
SVISSGGSPYYA

SEQ ID NO: 559 - protein, 13 aa, Artificial Sequence
  Synthesized molecular recognition unit - heavy CDR2
SVISTSGDTVLYT

SEQ ID NO: 560 - protein, 13 aa, Artificial Sequence
  Synthesized molecular recognition unit - heavy CDR2
SVISTSGGTVLYT

SEQ ID NO: 561 - protein, 12 aa, Artificial Sequence
  Synthesized molecular recognition unit - heavy CDR2
SVIYGGGNTNYA

SEQ ID NO: 562 - protein, 13 aa, Artificial Sequence
  Synthesized molecular recognition unit - heavy CDR2
SYIENDGSITTYA

SEQ ID NO: 563 - protein, 13 aa, Artificial Sequence
  Synthesized molecular recognition unit - heavy CDR2
SYIGTSDGTTYYA

SEQ ID NO: 564 - protein, 13 aa, Artificial Sequence
  Synthesized molecular recognition unit - heavy CDR2
SYISAGDGFTYYA

SEQ ID NO: 565 - protein, 13 aa, Artificial Sequence
  Synthesized molecular recognition unit - heavy CDR2
SYISGAGGSTEYA

SEQ ID NO: 566 - protein, 13 aa, Artificial Sequence
  Synthesized molecular recognition unit - heavy CDR2
SYISGDSGYTNYA

SEQ ID NO: 567 - protein, 13 aa, Artificial Sequence
  Synthesized molecular recognition unit - heavy CDR2
SYISSGSYTIYYS

SEQ ID NO: 568 - protein, 13 aa, Artificial Sequence
  Synthesized molecular recognition unit - heavy CDR2
SYISSSGSITHYA

SEQ ID NO: 569 - protein, 13 aa, Artificial Sequence
  Synthesized molecular recognition unit - heavy CDR2
SYISSSSSAIYYA

SEQ ID NO: 570 - protein, 13 aa, Artificial Sequence
  Synthesized molecular recognition unit - heavy CDR2
SYISSSSSTIYYA

SEQ ID NO: 571 - protein, 13 aa, Artificial Sequence
  Synthesized molecular recognition unit - heavy CDR2
SYISTSDGSTYYA

SEQ ID NO: 572 - protein, 13 aa, Artificial Sequence
  Synthesized molecular recognition unit - heavy CDR2
SYSSGNSGYTNYA

SEQ ID NO: 573 - protein, 13 aa, Artificial Sequence
  Synthesized molecular recognition unit - heavy CDR2
TVISGSGGSTYYA

SEQ ID NO: 574 - protein, 13 aa, Artificial Sequence
  Synthesized molecular recognition unit - heavy CDR2
TVISGSGGSTYYS

SEQ ID NO: 575 - protein, 15 aa, Artificial Sequence
  Synthesized molecular recognition unit - heavy CDR3
CAAASSLTSTPYDLW

SEQ ID NO: 576 - protein, 23 aa, Artificial Sequence
  Synthesized molecular recognition unit - heavy CDR3
CAADRSPYYYDSSGYYPDAFDIW

SEQ ID NO: 577 - protein, 18 aa, Artificial Sequence
  Synthesized molecular recognition unit - heavy CDR3
CAAGFPTVFVVDGEYDYW

SEQ ID NO: 578 - protein, 17 aa, Artificial Sequence
  Synthesized molecular recognition unit - heavy CDR3
CAAGPIARWYRGDMDYW

SEQ ID NO: 579 - protein, 19 aa, Artificial Sequence
  Synthesized molecular recognition unit - heavy CDR3
CAAGPNYSWFMPSSSRLIW

SEQ ID NO: 580 - protein, 12 aa, Artificial Sequence
  Synthesized molecular recognition unit - heavy CDR3
CAAGPTLPFRYW

SEQ ID NO: 581 - protein, 12 aa, Artificial Sequence
  Synthesized molecular recognition unit - heavy CDR3
CAAGVTGSWRYW

SEQ ID NO: 582 - protein, 15 aa, Artificial Sequence
  Synthesized molecular recognition unit - heavy CDR3
CAAPDVVVTADGYYW

SEQ ID NO: 583 - protein, 7 aa, Artificial Sequence
  Synthesized molecular recognition unit - heavy CDR3
CAAPDYW

SEQ ID NO: 584 - protein, 22 aa, Artificial Sequence
  Synthesized molecular recognition unit - heavy CDR3
CAAPQSPNMYIRTDQLWWYKYW

SEQ ID NO: 585 - protein, 22 aa, Artificial Sequence
  Synthesized molecular recognition unit - heavy CDR3
CAAQKPYYNGHFYADDKHYDHW

SEQ ID NO: 586 - protein, 19 aa, Artificial Sequence
  Synthesized molecular recognition unit - heavy CDR3
CAAVFLSRNYEIQEYYRYQ

SEQ ID NO: 587 - protein, 10 aa, Artificial Sequence
  Synthesized molecular recognition unit - heavy CDR3
CADGSGTSHR

SEQ ID NO: 588 - protein, 11 aa, Artificial Sequence
  Synthesized molecular recognition unit - heavy CDR3
CAESLTSTADW

SEQ ID NO: 589 - protein, 9 aa, Artificial Sequence
  Synthesized molecular recognition unit - heavy CDR3
CAGGEVYEL

SEQ ID NO: 590 - protein, 15 aa, Artificial Sequence
  Synthesized molecular recognition unit - heavy CDR3
CAHSDFFSGLSFGDW

SEQ ID NO: 591 - protein, 9 aa, Artificial Sequence
  Synthesized molecular recognition unit - heavy CDR3
CAIRAFDIW

SEQ ID NO: 592 - protein, 15 aa, Artificial Sequence
  Synthesized molecular recognition unit - heavy CDR3
CAKAGDWGLYGMDVW

SEQ ID NO: 593 - protein, 10 aa, Artificial Sequence
  Synthesized molecular recognition unit - heavy CDR3
CAKAGQQLDW

SEQ ID NO: 594 - protein, 16 aa, Artificial Sequence
  Synthesized molecular recognition unit - heavy CDR3
CAKASTPMVQGAPDYW

SEQ ID NO: 595 - protein, 8 aa, Artificial Sequence
  Synthesized molecular recognition unit - heavy CDR3
CAKDGVVR

SEQ ID NO: 596 - protein, 7 aa, Artificial Sequence [sequence omitted]

SEQ ID NO: 597 - protein, 14 aa, Artificial Sequence
  Synthesized molecular recognition unit - heavy CDR3
CAKDHLAVADAHGR

SEQ ID NO: 598 - protein, 16 aa, Artificial Sequence
  Synthesized molecular recognition unit - heavy CDR3
CAKDIGSSWYYYMDVW

SEQ ID NO: 599 - protein, 17 aa, Artificial Sequence
  Synthesized molecular recognition unit - heavy CDR3
CAKDITPYGDYSILSHW

SEQ ID NO: 600 - protein, 17 aa, Artificial Sequence
  Synthesized molecular recognition unit - heavy CDR3
CAKDKVPYSYGPNFDYW

SEQ ID NO: 601 - protein, 16 aa, Artificial Sequence
  Synthesized molecular recognition unit - heavy CDR3
CAKDLVPWGSSAFNIW

SEQ ID NO: 602 - protein, 19 aa, Artificial Sequence
  Synthesized molecular recognition unit - heavy CDR3
CAKDLVPYCSGGSCPPSGW

SEQ ID NO: 603 - protein, 12 aa, Artificial Sequence
  Synthesized molecular recognition unit - heavy CDR3
CAKDNGWYFDLW

SEQ ID NO: 604 - protein, 15 aa, Artificial Sequence
  Synthesized molecular recognition unit - heavy CDR3
CAKDRGNYGDYLDYW

SEQ ID NO: 605 - protein, 16 aa, Artificial Sequence
  Synthesized molecular recognition unit - heavy CDR3
CAKDRGYSSGWYLDYW

SEQ ID NO: 606 - protein, 25 aa, Artificial Sequence
  Synthesized molecular recognition unit - heavy CDR3
CAKDSIGRRGRGAPQPYYYYGMDVW

SEQ ID NO: 607 - protein, 8 aa, Artificial Sequence
  Synthesized molecular recognition unit - heavy CDR3
CAKDVNYW

SEQ ID NO: 608 - protein, 16 aa, Artificial Sequence
  Synthesized molecular recognition unit - heavy CDR3
CAKGAGYGSGSWQAAW

SEQ ID NO: 609 - protein, 12 aa, Artificial Sequence
  Synthesized molecular recognition unit - heavy CDR3
CAKGDYGALDYW

SEQ ID NO: 610 - protein, 14 aa, Artificial Sequence
  Synthesized molecular recognition unit - heavy CDR3
CAKGGQWLYGMDVW

SEQ ID NO: 611 - protein, 16 aa, Artificial Sequence
  Synthesized molecular recognition unit - heavy CDR3
CAKGGRDGYKGYFDYW

SEQ ID NO: 612 - protein, 13 aa, Artificial Sequence
  Synthesized molecular recognition unit - heavy CDR3
CAKGGWRSSFDPW

SEQ ID NO: 613 - protein, 11 aa, Artificial Sequence
  Synthesized molecular recognition unit - heavy CDR3
CAKGIRWFDPW

SEQ ID NO: 614 - protein, 15 aa, Artificial Sequence
  Synthesized molecular recognition unit - heavy CDR3
CAKGIVGDYGAFDIW

SEQ ID NO: 615 - protein, 12 aa, Artificial Sequence
  Synthesized molecular recognition unit - heavy CDR3
CAKGLWGPLLNW

SEQ ID NO: 616 - protein, 11 aa, Artificial Sequence
  Synthesized molecular recognition unit - heavy CDR3
CAKGNWAFDIW

SEQ ID NO: 617 - protein, 16 aa, Artificial Sequence
  Synthesized molecular recognition unit - heavy CDR3
CAKGSLLLGYYGMDVW

SEQ ID NO: 618 - protein, 18 aa, Artificial Sequence
  Synthesized molecular recognition unit - heavy CDR3
CAKGSVFGLKAGGYADYW

SEQ ID NO: 619 - protein, 21 aa, Artificial Sequence
  Synthesized molecular recognition unit - heavy CDR3
CAKGSYYYDNSGYYWDAFDIW

SEQ ID NO: 620 - protein, 21 aa, Artificial Sequence
  Synthesized molecular recognition unit - heavy CDR3
CAKGSYYYDSSGYYWDAFDIW

SEQ ID NO: 621 - protein, 16 aa, Artificial Sequence
  Synthesized molecular recognition unit - heavy CDR3
CAKLGGSSWLREYDYW

SEQ ID NO: 622 - protein, 18 aa, Artificial Sequence
  Synthesized molecular recognition unit - heavy CDR3
CAKPGIAAAGTNNWFDPW

SEQ ID NO: 623 - protein, 13 aa, Artificial Sequence
  Synthesized molecular recognition unit - heavy CDR3
CAKTGRGYAFDIW

SEQ ID NO: 624 - protein, 9 aa, Artificial Sequence
  Synthesized molecular recognition unit - heavy CDR3
CAKTKLPIW

SEQ ID NO: 625 - protein, 14 aa, Artificial Sequence
  Synthesized molecular recognition unit - heavy CDR3
CAKTLVTSHALHIW

SEQ ID NO: 626 - protein, 16 aa, Artificial Sequence
  Synthesized molecular recognition unit - heavy CDR3
CAKWHIGATGNWFDPW

SEQ ID NO: 627 - protein, 22 aa, Artificial Sequence
  Synthesized molecular recognition unit - heavy CDR3
CALLVGAARGISYYYYYGMDVW

SEQ ID NO: 628 - protein, 14 aa, Artificial Sequence
  Synthesized molecular recognition unit - heavy CDR3
CALSSSWYGGFDYW

SEQ ID NO: 629 - protein, 11 aa, Artificial Sequence
  Synthesized molecular recognition unit - heavy CDR3
CANGSYAQHLW

SEQ ID NO: 630 - protein, 12 aa, Artificial Sequence
  Synthesized molecular recognition unit - heavy CDR3
CAPNESGNVDYW

SEQ ID NO: 631 - protein, 17 aa, Artificial Sequence
  Synthesized molecular recognition unit - heavy CDR3
CAPRVLVTAPSGGMDYW

SEQ ID NO: 632 - protein, 7 aa, Artificial Sequence
  Synthesized molecular recognition unit - heavy CDR3
CAQGTYW

SEQ ID NO: 633 - protein, 14 aa, Artificial Sequence
  Synthesized molecular recognition unit - heavy CDR3
CARAAAGSYGGGYW

SEQ ID NO: 634 - protein, 20 aa, Artificial Sequence
  Synthesized molecular recognition unit - heavy CDR3
CARAALGYCTGGVCPPVDYW

SEQ ID NO: 635 - protein, 20 aa, Artificial Sequence
  Synthesized molecular recognition unit - heavy CDR3
CARADDYYDSSGYYYGFDYW

SEQ ID NO: 636 - protein, 11 aa, Artificial Sequence
  Synthesized molecular recognition unit - heavy CDR3
CARAGDSPDYW

SEQ ID NO: 637 - protein, 14 aa, Artificial Sequence
  Synthesized molecular recognition unit - heavy CDR3
CARAGSGYYNFDYW

SEQ ID NO: 638 - protein, 14 aa, Artificial Sequence
  Synthesized molecular recognition unit - heavy CDR3
CARAGVATIAFDYW

SEQ ID NO: 639 - protein, 12 aa, Artificial Sequence
  Synthesized molecular recognition unit - heavy CDR3
CARAIPGDYDYW

SEQ ID NO: 640 - protein, 20 aa, Artificial Sequence
  Synthesized molecular recognition unit - heavy CDR3
CARAIVGATGLNRFKAFDIW

SEQ ID NO: 641 - protein, 18 aa, Artificial Sequence
  Synthesized molecular recognition unit - heavy CDR3
CARAKGSGWYVGSAFDIW

SEQ ID NO: 642 - protein, 17 aa, Artificial Sequence
  Synthesized molecular recognition unit - heavy CDR3
CARAMWSYGQQNAFDIW

SEQ ID NO: 643 - protein, 16 aa, Artificial Sequence
  Synthesized molecular recognition unit - heavy CDR3
CARAPLDGSGSYYVDW

SEQ ID NO: 644 - protein, 15 aa, Artificial Sequence
  Synthesized molecular recognition unit - heavy CDR3
CARAPSYSSGWYVRW

SEQ ID NO: 645 - protein, 19 aa, Artificial Sequence
  Synthesized molecular recognition unit - heavy CDR3
CARAPYYYGSGSLFRLDYW

SEQ ID NO: 646 - protein, 13 aa, Artificial Sequence
  Synthesized molecular recognition unit - heavy CDR3
CARARGGDSPLSL

SEQ ID NO: 647 - protein, 19 aa, Artificial Sequence
  Synthesized molecular recognition unit - heavy CDR3
CARARLLGGYYTPDRMDVW

SEQ ID NO: 648 - protein, 16 aa, Artificial Sequence
  Synthesized molecular recognition unit - heavy CDR3
CARARSSGWTDAFDIW

SEQ ID NO: 649 - protein, 16 aa, Artificial Sequence
  Synthesized molecular recognition unit - heavy CDR3
CARASAWTPYGAFDIW

SEQ ID NO: 650 - protein, 23 aa, Artificial Sequence
  Synthesized molecular recognition unit - heavy CDR3
CARASLYYDYVWGSYRHYYFDYW

SEQ ID NO: 651 - protein, 17 aa, Artificial Sequence
  Synthesized molecular recognition unit - heavy CDR3
CARASRIDGGWPIIDHL

SEQ ID NO: 652 - protein, 18 aa, Artificial Sequence
  Synthesized molecular recognition unit - heavy CDR3
CARASSWYLHYYYGMDVW

SEQ ID NO: 653 - protein, 13 aa, Artificial Sequence
  Synthesized molecular recognition unit - heavy CDR3
CARASTSGDYSLW

SEQ ID NO: 654 - protein, 15 aa, Artificial Sequence
  Synthesized molecular recognition unit - heavy CDR3
CARATGFGTVVFDYW

SEQ ID NO: 655 - protein, 17 aa, Artificial Sequence
  Synthesized molecular recognition unit - heavy CDR3
CARATQELLLPYGMDVW

SEQ ID NO: 656 - protein, 26 aa, Artificial Sequence
  Synthesized molecular recognition unit - heavy CDR3
CARATSLGRRYCSSTSCYPRDAFDIW

SEQ ID NO: 657 - protein, 14 aa, Artificial Sequence
  Synthesized molecular recognition unit - heavy CDR3
CARATYGGDAFDIW

SEQ ID NO: 658 - protein, 18 aa, Artificial Sequence
  Synthesized molecular recognition unit - heavy CDR3
CARAWKGLWFGEGTFDYW

SEQ ID NO: 659 - protein, 19 aa, Artificial Sequence
  Synthesized molecular recognition unit - heavy CDR3
CARDADSSGYYRYDAFDIW

SEQ ID NO: 660 - protein, 12 aa, Artificial Sequence
  Synthesized molecular recognition unit - heavy CDR3
CARDAYNWFDPR

SEQ ID NO: 661 - protein, 12 aa, Artificial Sequence
  Synthesized molecular recognition unit - heavy CDR3
CARDAYNWFDPW

SEQ ID NO: 662 - protein, 17 aa, Artificial Sequence
  Synthesized molecular recognition unit - heavy CDR3
CARDCSGGSCYSHFDYW

SEQ ID NO: 663 - protein, 17 aa, Artificial Sequence
  Synthesized molecular recognition unit - heavy CDR3
CARDEGAGYYYYYMDVW

SEQ ID NO: 664 - protein, 13 aa, Artificial Sequence
  Synthesized molecular recognition unit - heavy CDR3
CARDGGDYGMDVW

SEQ ID NO: 665 - protein, 8 aa, Artificial Sequence [sequence omitted]

SEQ ID NO: 666 - protein, 13 aa, Artificial Sequence
  Synthesized molecular recognition unit - heavy CDR3
CARDGIWDIFDYW

SEQ ID NO: 667 - protein, 18 aa, Artificial Sequence
  Synthesized molecular recognition unit - heavy CDR3
CARDGSSGWYSPNAFDIW

SEQ ID NO: 668 - protein, 7 aa, Artificial Sequence
  Synthesized molecular recognition unit - heavy CDR3
CARDGSW

SEQ ID NO: 669 - protein, 17 aa, Artificial Sequence
  Synthesized molecular recognition unit - heavy CDR3
CARDGTPFYSGSYYGSW

SEQ ID NO: 670 - protein, 7 aa, Artificial Sequence
  Synthesized molecular recognition unit - heavy CDR3
CARDGVE

SEQ ID NO: 671 - protein, 19 aa, Artificial Sequence
  Synthesized molecular recognition unit - heavy CDR3
CARDHGSSWYQNTDAFDIW

SEQ ID NO: 672 - protein, 14 aa, Artificial Sequence
  Synthesized molecular recognition unit - heavy CDR3
CARDITGADGMDVW

SEQ ID NO: 673 - protein, 12 aa, Artificial Sequence
  Synthesized molecular recognition unit - heavy CDR3
CARDLDSGFDLW

SEQ ID NO: 674 - protein, 15 aa, Artificial Sequence
  Synthesized molecular recognition unit - heavy CDR3
CARDLMVGRNKLDYW

SEQ ID NO: 675 - protein, 20 aa, Artificial Sequence
  Synthesized molecular recognition unit - heavy CDR3
CARDLRFYSSSWRRVGMDVW

SEQ ID NO: 676 - protein, 19 aa, Artificial Sequence
  Synthesized molecular recognition unit - heavy CDR3
CARDLSPMVRGVISGMDVW

SEQ ID NO: 677 - protein, 18 aa, Artificial Sequence
  Synthesized molecular recognition unit - heavy CDR3
CARDLTPFTQQQLVLGLL

SEQ ID NO: 678 - protein, 23 aa, Artificial Sequence
  Synthesized molecular recognition unit - heavy CDR3
CARDLTYYYDSSGHSPLGAFDIW

SEQ ID NO: 679 - protein, 16 aa, Artificial Sequence
  Synthesized molecular recognition unit - heavy CDR3
CARDLVAARPSNWDYW

SEQ ID NO: 680 - protein, 23 aa, Artificial Sequence
  Synthesized molecular recognition unit - heavy CDR3
CARDNGYCSGGSCYATYYGMDVR

SEQ ID NO: 681 - protein, 18 aa, Artificial Sequence
  Synthesized molecular recognition unit - heavy CDR3
CARDPIMFGDQPGWFDPW

SEQ ID NO: 682 - protein, 15 aa, Artificial Sequence
  Synthesized molecular recognition unit - heavy CDR3
CARDQNDSWYRSDYW

SEQ ID NO: 683 - protein, 22 aa, Artificial Sequence
  Synthesized molecular recognition unit - heavy CDR3
CARDRDIVVVPAQRGEGGFDPW

SEQ ID NO: 684 - protein, 8 aa, Artificial Sequence [sequence omitted]

SEQ ID NO: 685 - protein, 13 aa, Artificial Sequence
  Synthesized molecular recognition unit - heavy CDR3
CARDRFDNWFDPW

SEQ ID NO: 686 - protein, 11 aa, Artificial Sequence
  Synthesized molecular recognition unit - heavy CDR3
CARDRLAFDYW

SEQ ID NO: 687 - protein, 11 aa, Artificial Sequence
  Synthesized molecular recognition unit - heavy CDR3
CARDRPGFDPW

SEQ ID NO: 688 - protein, 16 aa, Artificial Sequence
  Synthesized molecular recognition unit - heavy CDR3
CARDRPSSSWYAFDYW

SEQ ID NO: 689 - protein, 16 aa, Artificial Sequence
  Synthesized molecular recognition unit - heavy CDR3
CARDRPTSSWYAFDYW

SEQ ID NO: 690 - protein, 19 aa, Artificial Sequence
  Synthesized molecular recognition unit - heavy CDR3
CARDRPYSSGWYYPAFDIW

SEQ ID NO: 691 - protein, 17 aa, Artificial Sequence
  Synthesized molecular recognition unit - heavy CDR3
CARDRQLGWAHWYFDLW

SEQ ID NO: 692 - protein, 13 aa, Artificial Sequence
  Synthesized molecular recognition unit - heavy CDR3
CARDRRGYGMDVW

SEQ ID NO: 693 - protein, 22 aa, Artificial Sequence
  Synthesized molecular recognition unit - heavy CDR3
CARDRVTLRGGYSYGTDAFDIW

SEQ ID NO: 694 - protein, 16 aa, Artificial Sequence
  Synthesized molecular recognition unit - heavy CDR3
CARDSDFWYYYGMDVW

SEQ ID NO: 695 - protein, 19 aa, Artificial Sequence
  Synthesized molecular recognition unit - heavy CDR3
CARDSSSGWYASYYGMDVW

SEQ ID NO: 696 - protein, 19 aa, Artificial Sequence
  Synthesized molecular recognition unit - heavy CDR3
CARDSSSWYSYYYYYMDVW

SEQ ID NO: 697 - protein, 13 aa, Artificial Sequence
  Synthesized molecular recognition unit - heavy CDR3
CARDSYPYGMDVW

SEQ ID NO: 698 - protein, 16 aa, Artificial Sequence
  Synthesized molecular recognition unit - heavy CDR3
CARDTCSSTSCSPDYW

SEQ ID NO: 699 - protein, 16 aa, Artificial Sequence
  Synthesized molecular recognition unit - heavy CDR3
CARDVCSGGSCSPDVW

SEQ ID NO: 700 - protein, 9 aa, Artificial Sequence
  Synthesized molecular recognition unit - heavy CDR3
CARDVMDVW

SEQ ID NO: 701 - protein, 20 aa, Artificial Sequence
  Synthesized molecular recognition unit - heavy CDR3
CARDVPKLVTRGVAYGMDVW

SEQ ID NO: 702 - protein, 15 aa, Artificial Sequence
  Synthesized molecular recognition unit - heavy CDR3
CAREAGTTGGWFDPW

SEQ ID NO: 703 - protein, 22 aa, Artificial Sequence
  Synthesized molecular recognition unit - heavy CDR3
CAREANYDILTGYIRPDAFDIW

SEQ ID NO: 704 - protein, 14 aa, Artificial Sequence
  Synthesized molecular recognition unit - heavy CDR3
CAREEWELFGMDVW

SEQ ID NO: 705 - protein, 18 aa, Artificial Sequence
  Synthesized molecular recognition unit - heavy CDR3
CAREGRSRVYGGNSFDYW

SEQ ID NO: 706 - protein, 15 aa, Artificial Sequence
  Synthesized molecular recognition unit - heavy CDR3
CAREGSYYDWYFDLW

SEQ ID NO: 707 - protein, 17 aa, Artificial Sequence
  Synthesized molecular recognition unit - heavy CDR3
CAREGWFGESPFGMDVW

SEQ ID NO: 708 - protein, 18 aa, Artificial Sequence
  Synthesized molecular recognition unit - heavy CDR3
CAREGYDFWSGPYAFDIW

SEQ ID NO: 709 - protein, 17 aa, Artificial Sequence
  Synthesized molecular recognition unit - heavy CDR3
CARELLPMTTVTSPFIW

SEQ ID NO: 710 - protein, 15 aa, Artificial Sequence
  Synthesized molecular recognition unit - heavy CDR3
CARESVNNYYYMDVW

SEQ ID NO: 711 - protein, 15 aa, Artificial Sequence
  Synthesized molecular recognition unit - heavy CDR3
CARETTDYYYGMDVW

SEQ ID NO: 712 - protein, 12 aa, Artificial Sequence
  Synthesized molecular recognition unit - heavy CDR3
CAREYLGSFDIW

SEQ ID NO: 713 - protein, 13 aa, Artificial Sequence
  Synthesized molecular recognition unit - heavy CDR3
CARFDYFGGMDVW

SEQ ID NO: 714 - protein, 18 aa, Artificial Sequence
  Synthesized molecular recognition unit - heavy CDR3
CARFYYDILNGYSYFDYW

SEQ ID NO: 715 - protein, 18 aa, Artificial Sequence
  Synthesized molecular recognition unit - heavy CDR3
CARFYYDILTGYSYFDYW

SEQ ID NO: 716 - protein, 11 aa, Artificial Sequence
  Synthesized molecular recognition unit - heavy CDR3
CARGALGMDVW

SEQ ID NO: 717 - protein, 10 aa, Artificial Sequence [sequence omitted]

SEQ ID NO: 718 - protein, 13 aa, Artificial Sequence
  Synthesized molecular recognition unit - heavy CDR3
CARGARLYGCDYW

SEQ ID NO: 719 - protein, 13 aa, Artificial Sequence
  Synthesized molecular recognition unit - heavy CDR3
CARGARLYGFDYW

SEQ ID NO: 720 - protein, 13 aa, Artificial Sequence
  Synthesized molecular recognition unit - heavy CDR3
CARGDSGSYRDYW

SEQ ID NO: 721 - protein, 23 aa, Artificial Sequence
  Synthesized molecular recognition unit - heavy CDR3
CARGDYDFWSGYHEYYYYGMDVW

SEQ ID NO: 722 - protein, 19 aa, Artificial Sequence
  Synthesized molecular recognition unit - heavy CDR3
CARGFCSGGSCLWYGMDVW

SEQ ID NO: 723 - protein, 16 aa, Artificial Sequence
  Synthesized molecular recognition unit - heavy CDR3
CARGGAGRFGEGMDVW

SEQ ID NO: 724 - protein, 22 aa, Artificial Sequence
  Synthesized molecular recognition unit - heavy CDR3
CARGGEYSSGWTYYYYYGMDVW

SEQ ID NO: 725 - protein, 11 aa, Artificial Sequence [sequence omitted]

SEQ ID NO: 726 - protein, 11 aa, Artificial Sequence
  Synthesized molecular recognition unit - heavy CDR3
CARGGGYSSSW

SEQ ID NO: 727 - protein, 13 aa, Artificial Sequence
  Synthesized molecular recognition unit - heavy CDR3
CARGGLDGPIDYR

SEQ ID NO: 728 - protein, 11 aa, Artificial Sequence
  Synthesized molecular recognition unit - heavy CDR3
CARGGLLFDYW

SEQ ID NO: 729 - protein, 20 aa, Artificial Sequence
  Synthesized molecular recognition unit - heavy CDR3
CARGGLLRFGDGWGMGMDVW

SEQ ID NO: 730 - protein, 13 aa, Artificial Sequence
  Synthesized molecular recognition unit - heavy CDR3
CARGGNYGSGDYW

SEQ ID NO: 731 - protein, 18 aa, Artificial Sequence
  Synthesized molecular recognition unit - heavy CDR3
CARGGPIHYYYYYYMDVW

SEQ ID NO: 732 - protein, 20 aa, Artificial Sequence
  Synthesized molecular recognition unit - heavy CDR3
CARGGQGGYDWGHYHGLDVW

SEQ ID NO: 733 - protein, 13 aa, Artificial Sequence
  Synthesized molecular recognition unit - heavy CDR3
CARGGSGGNLSYW

SEQ ID NO: 734 - protein, 20 aa, Artificial Sequence
  Synthesized molecular recognition unit - heavy CDR3
CARGGSRYDFWSGHWYFDLW

SEQ ID NO: 735 - protein, 10 aa, Artificial Sequence
  Synthesized molecular recognition unit - heavy CDR3
CARGGSSDVR

SEQ ID NO: 736 - protein, 15 aa, Artificial Sequence
  Synthesized molecular recognition unit - heavy CDR3
CARGGSTGYYGMDVW

SEQ ID NO: 737 - protein, 22 aa, Artificial Sequence
  Synthesized molecular recognition unit - heavy CDR3
CARGGWRPDYYGSGSYYSFDYW

SEQ ID NO: 738 - protein, 16 aa, Artificial Sequence
  Synthesized molecular recognition unit - heavy CDR3
CARGGWTNYGGNLDYW

SEQ ID NO: 739 - protein, 15 aa, Artificial Sequence
  Synthesized molecular recognition unit - heavy CDR3
CARGGYSYGTVFDYW

SEQ ID NO: 740 - protein, 13 aa, Artificial Sequence [sequence omitted]

SEQ ID NO: 741 - protein, 16 aa, Artificial Sequence
  Synthesized molecular recognition unit - heavy CDR3
CARGKEGRYSNYEAAW

SEQ ID NO: 742 - protein, 19 aa, Artificial Sequence
  Synthesized molecular recognition unit - heavy CDR3
CARGKGYSYGYGKDWFDPW

SEQ ID NO: 743 - protein, 12 aa, Artificial Sequence
  Synthesized molecular recognition unit - heavy CDR3
CARGKSGSFDYW

SEQ ID NO: 744 - protein, 18 aa, Artificial Sequence
  Synthesized molecular recognition unit - heavy CDR3
CARGLPPAAGGGGYFQHW

SEQ ID NO: 745 - protein, 23 aa, Artificial Sequence
  Synthesized molecular recognition unit - heavy CDR3
CARGLRYFDWPQGIYYYYGMDVW

SEQ ID NO: 746 - protein, 15 aa, Artificial Sequence
  Synthesized molecular recognition unit - heavy CDR3
CARGLVIATNWFDPW

SEQ ID NO: 747 - protein, 23 aa, Artificial Sequence
  Synthesized molecular recognition unit - heavy CDR3
CARGNPTSGHIVVVPAATFSDYW

SEQ ID NO: 748 - protein, 16 aa, Artificial Sequence
  Synthesized molecular recognition unit - heavy CDR3
CARGPKTMWEDRPDYW

SEQ ID NO: 749 - protein, 18 aa, Artificial Sequence
  Synthesized molecular recognition unit - heavy CDR3
CARGPLPTKIGGHYMDVW

SEQ ID NO: 750 - protein, 19 aa, Artificial Sequence
  Synthesized molecular recognition unit - heavy CDR3
CARGPRDSGYYPGGAFDIW

SEQ ID NO: 751 - protein, 14 aa, Artificial Sequence
  Synthesized molecular recognition unit - heavy CDR3
CARGPSHQHTFDIW

SEQ ID NO: 752 - protein, 20 aa, Artificial Sequence
  Synthesized molecular recognition unit - heavy CDR3
CARGQGYSSGWYRGDAFDIW

SEQ ID NO: 753 - protein, 19 aa, Artificial Sequence
  Synthesized molecular recognition unit - heavy CDR3
CARGQSEKWWSGLYGMDVW

SEQ ID NO: 754 - protein, 19 aa, Artificial Sequence
  Synthesized molecular recognition unit - heavy CDR3
CARGRGQQWLTGYYGMDVW

SEQ ID NO: 755 - protein, 19 aa, Artificial Sequence
  Synthesized molecular recognition unit - heavy CDR3
CARGRRLVRFTVTSAFDIW

SEQ ID NO: 756 - protein, 13 aa, Artificial Sequence
  Synthesized molecular recognition unit - heavy CDR3
CARGRVWSSRDYW

SEQ ID NO: 757 - protein, 14 aa, Artificial Sequence
  Synthesized molecular recognition unit - heavy CDR3
CARGSGIAASGSYW

SEQ ID NO: 758 - protein, 17 aa, Artificial Sequence
  Synthesized molecular recognition unit - heavy CDR3
CARGSGYDFFDYGMDVW

SEQ ID NO: 759 - protein, 12 aa, Artificial Sequence
  Synthesized molecular recognition unit - heavy CDR3
CARGSSGYYVAW

SEQ ID NO: 760 - protein, 11 aa, Artificial Sequence
  Synthesized molecular recognition unit - heavy CDR3
CARGSSSWYDW

SEQ ID NO: 761 - protein, 7 aa, Artificial Sequence [sequence omitted]

SEQ ID NO: 762 - protein, 17 aa, Artificial Sequence
  Synthesized molecular recognition unit - heavy CDR3
CARGTFDWLLSPSYDYW

SEQ ID NO: 763 - protein, 19 aa, Artificial Sequence
  Synthesized molecular recognition unit - heavy CDR3
CARGTFLEWLLTNYGMDVW

SEQ ID NO: 764 - protein, 11 aa, Artificial Sequence
  Synthesized molecular recognition unit - heavy CDR3
CARGTGGFDYW

SEQ ID NO: 765 - protein, 14 aa, Artificial Sequence
  Synthesized molecular recognition unit - heavy CDR3
CARGVVGSGAFDIW

SEQ ID NO: 766 - protein, 20 aa, Artificial Sequence
  Synthesized molecular recognition unit - heavy CDR3
CARGVWTTPMGGGGNWFDPW

SEQ ID NO: 767 - protein, 24 aa, Artificial Sequence
  Synthesized molecular recognition unit - heavy CDR3
CARGVYPYSSKHKPSYYYYGMDVW

SEQ ID NO: 768 - protein, 11 aa, Artificial Sequence
  Synthesized molecular recognition unit - heavy CDR3
CARGWAGFDYW

SEQ ID NO: 769 - protein, 14 aa, Artificial Sequence
  Synthesized molecular recognition unit - heavy CDR3
CARGWTTISSLGVW

SEQ ID NO: 770 - protein, 18 aa, Artificial Sequence
  Synthesized molecular recognition unit - heavy CDR3
CARGYGDYVWGENYFDYW

SEQ ID NO: 771 - protein, 12 aa, Artificial Sequence [sequence omitted]

SEQ ID NO: 772 - protein, 17 aa, Artificial Sequence
  Synthesized molecular recognition unit - heavy CDR3
CARHAGFYGLADYFDYW

SEQ ID NO: 773 - protein, 12 aa, Artificial Sequence
  Synthesized molecular recognition unit - heavy CDR3
CARHGRIAADIW

SEQ ID NO: 774 - protein, 18 aa, Artificial Sequence
  Synthesized molecular recognition unit - heavy CDR3
CARHNPGYMGYYYGMDVW

SEQ ID NO: 775 - protein, 18 aa, Artificial Sequence
  Synthesized molecular recognition unit - heavy CDR3
CARHVYGSGTYNNWFDPW

SEQ ID NO: 776 - protein, 14 aa, Artificial Sequence
  Synthesized molecular recognition unit - heavy CDR3
CARHYYGSGNYRDW

SEQ ID NO: 777 - protein, 14 aa, Artificial Sequence [sequence omitted]

SEQ ID NO: 778 - protein, 13 aa, Artificial Sequence
  Synthesized molecular recognition unit - heavy CDR3
CARIGAGGAFDIW

SEQ ID NO: 779 - protein, 15 aa, Artificial Sequence
  Synthesized molecular recognition unit - heavy CDR3
CARIGIAVAAPVDHW

SEQ ID NO: 780 - protein, 18 aa, Artificial Sequence
  Synthesized molecular recognition unit - heavy CDR3
CARIPKPRGYSYGDNGSW

SEQ ID NO: 781 - protein, 18 aa, Artificial Sequence
  Synthesized molecular recognition unit - heavy CDR3
CARKVKGYCSGGSCYGYW

SEQ ID NO: 782 - protein, 9 aa, Artificial Sequence [sequence omitted]

SEQ ID NO: 783 - protein, 15 aa, Artificial Sequence
  Synthesized molecular recognition unit - heavy CDR3
CARLDPGYYYGMDVW

SEQ ID NO: 784 - protein, 11 aa, Artificial Sequence
  Synthesized molecular recognition unit - heavy CDR3
CARLGSTPDYW

SEQ ID NO: 785 - protein, 17 aa, Artificial Sequence
  Synthesized molecular recognition unit - heavy CDR3
CARLPRRSGKGSAFDIW

SEQ ID NO: 786 - protein, 23 aa, Artificial Sequence
  Synthesized molecular recognition unit - heavy CDR3
CARLPYYDFWSGYYGGRTGFDYW

SEQ ID NO: 787 - protein, 19 aa, Artificial Sequence
  Synthesized molecular recognition unit - heavy CDR3
CARLSVWKWEQVTNWFDPW

SEQ ID NO: 788 - protein, 21 aa, Artificial Sequence
  Synthesized molecular recognition unit - heavy CDR3
CARLSYYYDSSGPKGDAFDIW

SEQ ID NO: 789 - protein, 17 aa, Artificial Sequence
  Synthesized molecular recognition unit - heavy CDR3
CARLTGGAVAGTHRDYW

SEQ ID NO: 790 - protein, 15 aa, Artificial Sequence
  Synthesized molecular recognition unit - heavy CDR3
CARLVVRGGYGMDVW

SEQ ID NO: 791 - protein, 14 aa, Artificial Sequence
  Synthesized molecular recognition unit - heavy CDR3
CARMKDWFGAFDIW

SEQ ID NO: 792 - protein, 22 aa, Artificial Sequence
  Synthesized molecular recognition unit - heavy CDR3
CARMSSDYYDSSGYYRRGMDVW

SEQ ID NO: 793 - protein, 13 aa, Artificial Sequence
  Synthesized molecular recognition unit - heavy CDR3
CARNGIAAAEDYW

SEQ ID NO: 794 - protein, 13 aa, Artificial Sequence
  Synthesized molecular recognition unit - heavy CDR3
CARNNFLRAFDIW

SEQ ID NO: 795 - protein, 17 aa, Artificial Sequence
  Synthesized molecular recognition unit - heavy CDR3
CARNVEGATSFPEFDYW

SEQ ID NO: 796 - protein, 15 aa, Artificial Sequence
  Synthesized molecular recognition unit - heavy CDR3
CARPAGSAQNWFDPW

SEQ ID NO: 797 - protein, 14 aa, Artificial Sequence
  Synthesized molecular recognition unit - heavy CDR3
CARPIVGATAFDIW

SEQ ID NO: 798 - protein, 15 aa, Artificial Sequence
  Synthesized molecular recognition unit - heavy CDR3
CARPSTTGTKAFDIW

SEQ ID NO: 799 - protein, 14 aa, Artificial Sequence
  Synthesized molecular recognition unit - heavy CDR3
CARPSTTSFGMDVW

SEQ ID NO: 800 - protein, 14 aa, Artificial Sequence
  Synthesized molecular recognition unit - heavy CDR3
CARPYSSSRQGDYW

SEQ ID NO: 801 - protein, 19 aa, Artificial Sequence
  Synthesized molecular recognition unit - heavy CDR3
CARPYYYDSSGYDPMGDYW

SEQ ID NO: 802 - protein, 23 aa, Artificial Sequence
  Synthesized molecular recognition unit - heavy CDR3
CARQAGLHCSSTSCYLGNWFDPW

SEQ ID NO: 803 - protein, 14 aa, Artificial Sequence
  Synthesized molecular recognition unit - heavy CDR3
CARQIGWELMPDIW

SEQ ID NO: 804 - protein, 13 aa, Artificial Sequence
  Synthesized molecular recognition unit - heavy CDR3
CARQTRGGTTDGW

SEQ ID NO: 805 - protein, 19 aa, Artificial Sequence
  Synthesized molecular recognition unit - heavy CDR3
CARQYCSGGSCYPDAFDIR

SEQ ID NO: 806 - protein, 10 aa, Artificial Sequence [sequence omitted]

SEQ ID NO: 807 - protein, 18 aa, Artificial Sequence
  Synthesized molecular recognition unit - heavy CDR3
CARREPLYSSRRGAFDIW

SEQ ID NO: 808 - protein, 17 aa, Artificial Sequence
  Synthesized molecular recognition unit - heavy CDR3
CARRGYSSGWRDAFDIW

SEQ ID NO: 809 - protein, 16 aa, Artificial Sequence
  Synthesized molecular recognition unit - heavy CDR3
CARRLIAVAGAEFDPW

SEQ ID NO: 810 - protein, 20 aa, Artificial Sequence
  Synthesized molecular recognition unit - heavy CDR3
CARRSGYSGSVYYYYGMDVW

SEQ ID NO: 811 - protein, 14 aa, Artificial Sequence
  Synthesized molecular recognition unit - heavy CDR3
CARRTAVAGTIDYW

SEQ ID NO: 812 - protein, 11 aa, Artificial Sequence
  Synthesized molecular recognition unit - heavy CDR3
CARRTSASDIW

SEQ ID NO: 813 - protein, 13 aa, Artificial Sequence
  Synthesized molecular recognition unit - heavy CDR3
CARSAVAGAFDIW

SEQ ID NO: 814 - protein, 16 aa, Artificial Sequence
  Synthesized molecular recognition unit - heavy CDR3
CARSGMVKWLRSFDYW

SEQ ID NO: 815 - protein, 19 aa, Artificial Sequence
  Synthesized molecular recognition unit - heavy CDR3
CARSGPAAMVYYYYGMDVW

SEQ ID NO: 816 - protein, 15 aa, Artificial Sequence
  Synthesized molecular recognition unit - heavy CDR3
CARSGYNRRGYFDYW

SEQ ID NO: 817 - protein, 14 aa, Artificial Sequence
  Synthesized molecular recognition unit - heavy CDR3
CARSPRWYDAFDIW

SEQ ID NO: 818 - protein, 14 aa, Artificial Sequence
  Synthesized molecular recognition unit - heavy CDR3
CARSQATGERFDYW

SEQ ID NO: 819 - protein, 13 aa, Artificial Sequence
  Synthesized molecular recognition unit - heavy CDR3
CARSSDLRIFDYW

SEQ ID NO: 820 - protein, 16 aa, Artificial Sequence
  Synthesized molecular recognition unit - heavy CDR3
CARSSGWQNRFAFDIW

SEQ ID NO: 821 - protein, 14 aa, Artificial Sequence
  Synthesized molecular recognition unit - heavy CDR3
CARSSGYVGWFDPW

SEQ ID NO: 822 - protein, 10 aa, Artificial Sequence
  Synthesized molecular recognition unit - heavy CDR3
CARSTPFDPW

SEQ ID NO: 823 - protein, 24 aa, Artificial Sequence
  Synthesized molecular recognition unit - heavy CDR3
CARSVGEVGATMLGIGVWYWFDPW

SEQ ID NO: 824 - protein, 20 aa, Artificial Sequence
  Synthesized molecular recognition unit - heavy CDR3
CARSYYDSSGYPRKDAFDIW

SEQ ID NO: 825 - protein, 14 aa, Artificial Sequence
  Synthesized molecular recognition unit - heavy CDR3
CARTGRGYYGMDVW

SEQ ID NO: 826 - protein, 17 aa, Artificial Sequence
  Synthesized molecular recognition unit - heavy CDR3
CARTLTTPPYYYGMDVW

SEQ ID NO: 827 - protein, 12 aa, Artificial Sequence
  Synthesized molecular recognition unit - heavy CDR3
CARTYLKAFDIW

SEQ ID NO: 828 - protein, 22 aa, Artificial Sequence
  Synthesized molecular recognition unit - heavy CDR3
CARTYRIVGATPRYYYYGMDVW

SEQ ID NO: 829 - protein, 13 aa, Artificial Sequence
  Synthesized molecular recognition unit - heavy CDR3
CARVATGNAFDIW

SEQ ID NO: 830 - protein, 15 aa, Artificial Sequence
  Synthesized molecular recognition unit - heavy CDR3
CARVDGSGYYGIDYW

SEQ ID NO: 831 - protein, 11 aa, Artificial Sequence
  Synthesized molecular recognition unit - heavy CDR3
CARVFPLHDYW

SEQ ID NO: 832 - protein, 15 aa, Artificial Sequence
  Synthesized molecular recognition unit - heavy CDR3
CARVGATSAGGMDVW

SEQ ID NO: 833 - protein, 13 aa, Artificial Sequence
  Synthesized molecular recognition unit - heavy CDR3
CARVGPGGWFDPW

SEQ ID NO: 834 - protein, 13 aa, Artificial Sequence
  Synthesized molecular recognition unit - heavy CDR3
CARVGRGYSFDYW

SEQ ID NO: 835 - protein, 13 aa, Artificial Sequence
  Synthesized molecular recognition unit - heavy CDR3
CARVGWLRFLDYW

SEQ ID NO: 836 - protein, 16 aa, Artificial Sequence
  Synthesized molecular recognition unit - heavy CDR3
CARVIFSTVTTTNDIW

SEQ ID NO: 837 - protein, 13 aa, Artificial Sequence
  Synthesized molecular recognition unit - heavy CDR3
CARVKWELAIDYW

SEQ ID NO: 838 - protein, 25 aa, Artificial Sequence
  Synthesized molecular recognition unit - heavy CDR3
CARVLPGDSSGWYRGYYYYYGMDVW

SEQ ID NO: 839 - protein, 14 aa, Artificial Sequence
  Synthesized molecular recognition unit - heavy CDR3
CARVMLITDAFDIW

SEQ ID NO: 840 - protein, 15 aa, Artificial Sequence
  Synthesized molecular recognition unit - heavy CDR3
CARVPDFWSGYLDYW

SEQ ID NO: 841 - protein, 19 aa, Artificial Sequence
  Synthesized molecular recognition unit - heavy CDR3
CARVPTSPYDILTGPFDYW

SEQ ID NO: 842 - protein, 20 aa, Artificial Sequence
  Synthesized molecular recognition unit - heavy CDR3
CARVRARRFLVSDRSAFDIW

SEQ ID NO: 843 - protein, 21 aa, Artificial Sequence
  Synthesized molecular recognition unit - heavy CDR3
CARVRDYYDSSGYYYDYFDYW

SEQ ID NO: 844 - protein, 21 aa, Artificial Sequence
  Synthesized molecular recognition unit - heavy CDR3
CARVRSKAVAGTLPKRLFDIW

SEQ ID NO: 845 - protein, 13 aa, Artificial Sequence
  Synthesized molecular recognition unit - heavy CDR3
CARVSRGFAFDYW

SEQ ID NO: 846 - protein, 16 aa, Artificial Sequence
  Synthesized molecular recognition unit - heavy CDR3
CARVTLGASVDAFDIW

SEQ ID NO: 847 - protein, 15 aa, Artificial Sequence
  Synthesized molecular recognition unit - heavy CDR3
CARWAFPIPNAFDIW

SEQ ID NO: 848 - protein, 16 aa, Artificial Sequence
  Synthesized molecular recognition unit - heavy CDR3
CARWGDYGDLYYFDYW

SEQ ID NO: 849 - protein, 18 aa, Artificial Sequence
  Synthesized molecular recognition unit - heavy CDR3
CARWGKRLRGSPYYFDYW

SEQ ID NO: 850 - protein, 11 aa, Artificial Sequence
  Synthesized molecular recognition unit - heavy CDR3
CARWKNYFDPW

SEQ ID NO: 851 - protein, 11 aa, Artificial Sequence
  Synthesized molecular recognition unit - heavy CDR3
CARYGDYGDYW

SEQ ID NO: 852 - protein, 13 aa, Artificial Sequence
  Synthesized molecular recognition unit - heavy CDR3
CARYSSGGSLDYW

SEQ ID NO: 853 - protein, 11 aa, Artificial Sequence
  Synthesized molecular recognition unit - heavy CDR3
CASDPVTAATR

SEQ ID NO: 854 - protein, 11 aa, Artificial Sequence
  Synthesized molecular recognition unit - heavy CDR3
CASGLGYFDYW

SEQ ID NO: 855 - protein, 18 aa, Artificial Sequence
  Synthesized molecular recognition unit - heavy CDR3
CASKTTINSGWSREYHYW

SEQ ID NO: 856 - protein, 14 aa, Artificial Sequence
  Synthesized molecular recognition unit - heavy CDR3
CASPTGMTTNFDYW

SEQ ID NO: 857 - protein, 9 aa, Artificial Sequence
  Synthesized molecular recognition unit - heavy CDR3
CASPTVTRR

SEQ ID NO: 858 - protein, 18 aa, Artificial Sequence
  Synthesized molecular recognition unit - heavy CDR3
CASQNYYGSGSYPGFDYW

SEQ ID NO: 859 - protein, 13 aa, Artificial Sequence
  Synthesized molecular recognition unit - heavy CDR3
CASSHYAPGMDVW

SEQ ID NO: 860 - protein, 17 aa, Artificial Sequence
  Synthesized molecular recognition unit - heavy CDR3
CASSKEKATYYYGMDVW

SEQ ID NO: 861 - protein, 17 aa, Artificial Sequence
  Synthesized molecular recognition unit - heavy CDR3
CASSMVRVPYYYGMDVW

SEQ ID NO: 862 - protein, 16 aa, Artificial Sequence
  Synthesized molecular recognition unit - heavy CDR3
CASSRDGYNRLAFDIW

SEQ ID NO: 863 - protein, 21 aa, Artificial Sequence
  Synthesized molecular recognition unit - heavy CDR3
CASSSDYGDYLKEPNYGMDVW

SEQ ID NO: 864 - protein, 13 aa, Artificial Sequence
  Synthesized molecular recognition unit - heavy CDR3
CASTDPSSGLDYW

SEQ ID NO: 865 - protein, 11 aa, Artificial Sequence
  Synthesized molecular recognition unit - heavy CDR3
CATASGDFDYW

SEQ ID NO: 866 - protein, 14 aa, Artificial Sequence
  Synthesized molecular recognition unit - heavy CDR3
CATAYRRPGGLDVW

SEQ ID NO: 867 - protein, 26 aa, Artificial Sequence
  Synthesized molecular recognition unit - heavy CDR3
CATDLPVRKGFTYYDILTGSYGMDVW

SEQ ID NO: 868 - protein, 15 aa, Artificial Sequence
  Synthesized molecular recognition unit - heavy CDR3
CATGWPRYYYGMDVW

SEQ ID NO: 869 - protein, 14 aa, Artificial Sequence
  Synthesized molecular recognition unit - heavy CDR3
CATGYYYDYYFDYW

SEQ ID NO: 870 - protein, 15 aa, Artificial Sequence
  Synthesized molecular recognition unit - heavy CDR3
CATHDSSGYYSFDYW

SEQ ID NO: 871 - protein, 13 aa, Artificial Sequence
  Synthesized molecular recognition unit - heavy CDR3
CATLTPYGTVASY

SEQ ID NO: 872 - protein, 19 aa, Artificial Sequence
  Synthesized molecular recognition unit - heavy CDR3
CATSFGGGWIVVDTSLWYW

SEQ ID NO: 873 - protein, 22 aa, Artificial Sequence
  Synthesized molecular recognition unit - heavy CDR3
CATTQGVYSSSWYGGGRAFDIW

SEQ ID NO: 874 - protein, 25 aa, Artificial Sequence
  Synthesized molecular recognition unit - heavy CDR3
CATVQTNYYDSSGRFSYRAHYFDYW

SEQ ID NO: 875 - protein, 13 aa, Artificial Sequence
  Synthesized molecular recognition unit - heavy CDR3
CATYGDFGYFDLW

SEQ ID NO: 876 - protein, 11 aa, Artificial Sequence
  Synthesized molecular recognition unit - heavy CDR3
CEVHNFGATYW

SEQ ID NO: 877 - protein, 13 aa, Artificial Sequence
  Synthesized molecular recognition unit - heavy CDR3
CHFGVASVGLNYW

SEQ ID NO: 878 - protein, 12 aa, Artificial Sequence
  Synthesized molecular recognition unit - heavy CDR3
CIGVTYNGYTIG

SEQ ID NO: 879 - protein, 11 aa, Artificial Sequence
  Synthesized molecular recognition unit - heavy CDR3
CKVHNFEATYW

SEQ ID NO: 880 - protein, 11 aa, Artificial Sequence
  Synthesized molecular recognition unit - heavy CDR3
CKVHNFGATYW

SEQ ID NO: 881 - protein, 12 aa, Artificial Sequence
  Synthesized molecular recognition unit - heavy CDR3
CNADSLRGIDYW

SEQ ID NO: 882 - protein, 13 aa, Artificial Sequence
  Synthesized molecular recognition unit - heavy CDR3
CNADYGTWYGIGW

SEQ ID NO: 883 - protein, 22 aa, Artificial Sequence
  Synthesized molecular recognition unit - heavy CDR3
CNAGAPAWTYRMGTYYPQFGSW

SEQ ID NO: 884 - protein, 12 aa, Artificial Sequence
  Synthesized molecular recognition unit - heavy CDR3
CNALAPGVRGSW

SEQ ID NO: 885 - protein, 17 aa, Artificial Sequence
  Synthesized molecular recognition unit - heavy CDR3
CNARLDAVYGHSRYDSW

SEQ ID NO: 886 - protein, 14 aa, Artificial Sequence
  Synthesized molecular recognition unit - heavy CDR3
CNARLSFAGGMGYW

SEQ ID NO: 887 - protein, 12 aa, Artificial Sequence
  Synthesized molecular recognition unit - heavy CDR3
CNAVCKFGTTHW

SEQ ID NO: 888 - protein, 11 aa, Artificial Sequence
  Synthesized molecular recognition unit - heavy CDR3
CNAVNGRLNYW

SEQ ID NO: 889 - protein, 13 aa, Artificial Sequence
  Synthesized molecular recognition unit - heavy CDR3
CNAVSTDWTRDYW

SEQ ID NO: 890 - protein, 12 aa, Artificial Sequence
  Synthesized molecular recognition unit - heavy CDR3
CNAVTYNGYSIW

SEQ ID NO: 891 - protein, 12 aa, Artificial Sequence
  Synthesized molecular recognition unit - heavy CDR3
CNAVTYNGYTIW

SEQ ID NO: 892 - protein, 12 aa, Artificial Sequence
  Synthesized molecular recognition unit - heavy CDR3
CNAVWKFGTTHW

SEQ ID NO: 893 - protein, 18 aa, Artificial Sequence
  Synthesized molecular recognition unit - heavy CDR3
CNAWVLVAGSRGTSADYW

SEQ ID NO: 894 - protein, 12 aa, Artificial Sequence
  Synthesized molecular recognition unit - heavy CDR3
CNGVTYNGYTIW

SEQ ID NO: 895 - protein, 11 aa, Artificial Sequence
  Synthesized molecular recognition unit - heavy CDR3
CNLAQRGETYW

SEQ ID NO: 896 - protein, 16 aa, Artificial Sequence
  Synthesized molecular recognition unit - heavy CDR3
CNMGLGYSEYRPLGYW

SEQ ID NO: 897 - protein, 19 aa, Artificial Sequence
  Synthesized molecular recognition unit - heavy CDR3
CNMRGNWYREGRPAEFLSW

SEQ ID NO: 898 - protein, 12 aa, Artificial Sequence
  Synthesized molecular recognition unit - heavy CDR3
CNRVGSREYSYW

SEQ ID NO: 899 - protein, 11 aa, Artificial Sequence
  Synthesized molecular recognition unit - heavy CDR3
CNSFPLRLHDW

SEQ ID NO: 900 - protein, 10 aa, Artificial Sequence
  Synthesized molecular recognition unit - heavy CDR3
CNTGIPMLYW

SEQ ID NO: 901 - protein, 15 aa, Artificial Sequence
  Synthesized molecular recognition unit - heavy CDR3
CNTVTYNAGCYKKYW

SEQ ID NO: 902 - protein, 15 aa, Artificial Sequence
  Synthesized molecular recognition unit - heavy CDR3
CNTVTYTGGSYKNYW

SEQ ID NO: 903 - protein, 16 aa, Artificial Sequence
  Synthesized molecular recognition unit - heavy CDR3
CNVITIVRGMGPRAYW

SEQ ID NO: 904 - protein, 15 aa, Artificial Sequence
  Synthesized molecular recognition unit - heavy CDR3
CNVLAQNDGDYRTYG

SEQ ID NO: 905 - protein, 15 aa, Artificial Sequence
  Synthesized molecular recognition unit - heavy CDR3
CNVLAQNDGDYRTYW

SEQ ID NO: 906 - protein, 9 aa, Artificial Sequence
  Synthesized molecular recognition unit - heavy CDR3
CRVDAFDIW

SEQ ID NO: 907 - protein, 20 aa, Artificial Sequence
  Synthesized molecular recognition unit - heavy CDR3
CSADKLDYLDDQPFKTWDYW

SEQ ID NO: 908 - protein, 7 aa, Artificial Sequence
  Synthesized molecular recognition unit - heavy CDR3
CTDEESW

SEQ ID NO: 909 - protein, 20 aa, Artificial Sequence
  Synthesized molecular recognition unit - heavy CDR3
CTILPAAAAGTYYYYGMDVW

SEQ ID NO: 910 - protein, 13 aa, Artificial Sequence
  Synthesized molecular recognition unit - heavy CDR3
CTRDLYGGYRDYW

SEQ ID NO: 911 - protein, 13 aa, Artificial Sequence
  Synthesized molecular recognition unit - heavy CDR3
CTRGNWNVGLANW

SEQ ID NO: 912 - protein, 13 aa, Artificial Sequence
  Synthesized molecular recognition unit - heavy CDR3
CTRGSRIGWFDPW

SEQ ID NO: 913 - protein, 11 aa, Artificial Sequence
  Synthesized molecular recognition unit - heavy CDR3
CTRPYDAFDIW

SEQ ID NO: 914 - protein, 13 aa, Artificial Sequence
  Synthesized molecular recognition unit - heavy CDR3
CTRTIVGATPHYW

SEQ ID NO: 915 - protein, 15 aa, Artificial Sequence
  Synthesized molecular recognition unit - heavy CDR3
CTSSFLTGSQPSGYW

SEQ ID NO: 916 - protein, 18 aa, Artificial Sequence
  Synthesized molecular recognition unit - heavy CDR3
CTTDLRYDSSGPAAFDIW

SEQ ID NO: 917 - protein, 12 aa, Artificial Sequence
  Synthesized molecular recognition unit - heavy CDR3
CTTDPLELPWYW

SEQ ID NO: 918 - protein, 14 aa, Artificial Sequence
  Synthesized molecular recognition unit - heavy CDR3
CTTDRRYSTYFDLW

SEQ ID NO: 919 - protein, 21 aa, Artificial Sequence
  Synthesized molecular recognition unit - heavy CDR3
CTTGLFPYYRYNWNNDAFDIW

SEQ ID NO: 920 - protein, 10 aa, Artificial Sequence
  Synthesized molecular recognition unit - heavy CDR3
CTTPNYYDSR

SEQ ID NO: 921 - protein, 22 aa, Artificial Sequence
  Synthesized molecular recognition unit - heavy CDR3
CTTRTYDSSGYYETQNYYMDVW

SEQ ID NO: 922 - protein, 19 aa, Artificial Sequence
  Synthesized molecular recognition unit - heavy CDR3
CTTTEYSSSPDYYYGMDVW

SEQ ID NO: 923 - protein, 10 aa, Artificial Sequence
  Synthesized molecular recognition unit - heavy CDR3
CTTTTVTTSW

SEQ ID NO: 924 - protein, 12 aa, Artificial Sequence
  Synthesized molecular recognition unit - heavy CDR3
CVKDRAWGFDYW

SEQ ID NO: 925 - protein, 16 aa, Artificial Sequence
  Synthesized molecular recognition unit - heavy CDR3
CVKFGMNLGYSGYDYW

SEQ ID NO: 926 - protein, 16 aa, Artificial Sequence
  Synthesized molecular recognition unit - heavy CDR3
CVRDLRPSGDLNFDYW

SEQ ID NO: 927 - protein, 11 aa, Artificial Sequence
  Synthesized molecular recognition unit - heavy CDR3
CWGGSYYGDYW

SEQ ID NO: 928 - protein, 18 aa, Artificial Sequence
  Synthesized molecular recognition unit - heavy CDR3
CWTGLLWFGESTDAFDIW

SEQ ID NO: 929 - protein, 11 aa, Artificial Sequence
  Synthesized molecular recognition unit - heavy CDR3
CYLEGPLDVYW

SEQ ID NO: 930 - protein, 6 aa, Artificial Sequence
  Synthesized molecular recognition unit - heavy CDR3
PRLDYW

SEQ ID NO: 931 - protein, 14 aa, Artificial Sequence
  Synthesized molecular recognition unit - light CDR1
GLSSGSVSTNYYPS

SEQ ID NO: 932 - protein, 16 aa, Artificial Sequence
  Synthesized molecular recognition unit - light CDR1
KSSQSLLHSDGKTYLY

SEQ ID NO: 933 - protein, 16 aa, Artificial Sequence
  Synthesized molecular recognition unit - light CDR1
KSSQSLLHSDGYTYLY

SEQ ID NO: 934 - protein, 17 aa, Artificial Sequence
  Synthesized molecular recognition unit - light CDR1
KSSQSVLYSSNNKNYLA

SEQ ID NO: 935 - protein, 11 aa, Artificial Sequence
  Synthesized molecular recognition unit - light CDR1
QANQDISNYLN

SEQ ID NO: 936 - protein, 11 aa, Artificial Sequence
  Synthesized molecular recognition unit - light CDR1
QASHDINIALN

SEQ ID NO: 937 - protein, 11 aa, Artificial Sequence
  Synthesized molecular recognition unit - light CDR1
QASQDIDNYLN

SEQ ID NO: 938 - protein, 11 aa, Artificial Sequence
  Synthesized molecular recognition unit - light CDR1
QASQDIGKYLN

SEQ ID NO: 939 - protein, 11 aa, Artificial Sequence
  Synthesized molecular recognition unit - light CDR1
QASQDIGNYLN

SEQ ID NO: 940 - protein, 11 aa, Artificial Sequence
  Synthesized molecular recognition unit - light CDR1
QASQDIRNYLN

SEQ ID NO: 941 - protein, 11 aa, Artificial Sequence
  Synthesized molecular recognition unit - light CDR1
QASQDISHYLN

SEQ ID NO: 942 - protein, 11 aa, Artificial Sequence
  Synthesized molecular recognition unit - light CDR1
QASQDISNRLN

SEQ ID NO: 943 - protein, 11 aa, Artificial Sequence
  Synthesized molecular recognition unit - light CDR1
QASQDISNYLN

SEQ ID NO: 944 - protein, 11 aa, Artificial Sequence
  Synthesized molecular recognition unit - light CDR1
QASQDISSYLN

SEQ ID NO: 945 - protein, 11 aa, Artificial Sequence
  Synthesized molecular recognition unit - light CDR1
QASQDITNYLN

SEQ ID NO: 946 - protein, 11 aa, Artificial Sequence
  Synthesized molecular recognition unit - light CDR1
QASQGISNNLN

SEQ ID NO: 947 - protein, 11 aa, Artificial Sequence
  Synthesized molecular recognition unit - light CDR1
QASQGISNYLN

SEQ ID NO: 948 - protein, 11 aa, Artificial Sequence
  Synthesized molecular recognition unit - light CDR1
QATQNIKKYLN

SEQ ID NO: 949 - protein, 11 aa, Artificial Sequence
  Synthesized molecular recognition unit - light CDR1
QGDSLRTYYAS

SEQ ID NO: 950 - protein, 11 aa, Artificial Sequence
  Synthesized molecular recognition unit - light CDR1
QTSQDINNNLN

SEQ ID NO: 951 - protein, 11 aa, Artificial Sequence
  Synthesized molecular recognition unit - light CDR1
RAIQSISSYLN

SEQ ID NO: 952 - protein, 11 aa, Artificial Sequence
  Synthesized molecular recognition unit - light CDR1
RASESVSSNLA

SEQ ID NO: 953 - protein, 12 aa, Artificial Sequence
  Synthesized molecular recognition unit - light CDR1
RASESVSSSSFA

SEQ ID NO: 954 - protein, 11 aa, Artificial Sequence
  Synthesized molecular recognition unit - light CDR1
RASHDIGTFLA

SEQ ID NO: 955 - protein, 11 aa, Artificial Sequence
  Synthesized molecular recognition unit - light CDR1
RASQAISNSLA

SEQ ID NO: 956 - protein, 11 aa, Artificial Sequence
  Synthesized molecular recognition unit - light CDR1
RASQAISNYLN

SEQ ID NO: 957 - protein, 11 aa, Artificial Sequence
  Synthesized molecular recognition unit - light CDR1
RASQAISSYLA

SEQ ID NO: 958 - protein, 11 aa, Artificial Sequence
  Synthesized molecular recognition unit - light CDR1
RASQDIGSFLA

SEQ ID NO: 959 - protein, 11 aa, Artificial Sequence
  Synthesized molecular recognition unit - light CDR1
RASQDIRDELA

SEQ ID NO: 960 - protein, 11 aa, Artificial Sequence
  Synthesized molecular recognition unit - light CDR1
RASQDIRSALA

SEQ ID NO: 961 - protein, 11 aa, Artificial Sequence
  Synthesized molecular recognition unit - light CDR1
RASQDISSWLA

SEQ ID NO: 962 - protein, 11 aa, Artificial Sequence
  Synthesized molecular recognition unit - light CDR1
RASQDISSYLA

SEQ ID NO: 963 - protein, 11 aa, Artificial Sequence
  Synthesized molecular recognition unit - light CDR1
RASQDVDTWLA

SEQ ID NO: 964 - protein, 11 aa, Artificial Sequence
  Synthesized molecular recognition unit - light CDR1
RASQGINNYLA

SEQ ID NO: 965 - protein, 11 aa, Artificial Sequence
  Synthesized molecular recognition unit - light CDR1
RASQGIRNDLA

SEQ ID NO: 966 - protein, 11 aa, Artificial Sequence
  Synthesized molecular recognition unit - light CDR1
RASQGIRNDLG

SEQ ID NO: 967 - protein, 11 aa, Artificial Sequence
  Synthesized molecular recognition unit - light CDR1
RASQGIRSDLA

SEQ ID NO: 968 - protein, 11 aa, Artificial Sequence
  Synthesized molecular recognition unit - light CDR1
RASQGISNNIN

SEQ ID NO: 969 - protein, 11 aa, Artificial Sequence
  Synthesized molecular recognition unit - light CDR1
RASQGISNNLN

SEQ ID NO: 970 - protein, 11 aa, Artificial Sequence
  Synthesized molecular recognition unit - light CDR1
RASQGISNWLA

SEQ ID NO: 971 - protein, 11 aa, Artificial Sequence
  Synthesized molecular recognition unit - light CDR1
RASQGISNYLA

SEQ ID NO: 972 - protein, 11 aa, Artificial Sequence
  Synthesized molecular recognition unit - light CDR1
RASQGISRTLZ

SEQ ID NO: 973 - protein, 11 aa, Artificial Sequence
  Synthesized molecular recognition unit - light CDR1
RASQGISSALA

SEQ ID NO: 974 - protein, 11 aa, Artificial Sequence
  Synthesized molecular recognition unit - light CDR1
RASQGISSYLA

SEQ ID NO: 975 - protein, 11 aa, Artificial Sequence
  Synthesized molecular recognition unit - light CDR1
RASQGITKSLA

SEQ ID NO: 976 - protein, 11 aa, Artificial Sequence
  Synthesized molecular recognition unit - light CDR1
RASQGVGDYLA

SEQ ID NO: 977 - protein, 11 aa, Artificial Sequence
  Synthesized molecular recognition unit - light CDR1
RASQGVSTZLS

SEQ ID NO: 978 - protein, 11 aa, Artificial Sequence
  Synthesized molecular recognition unit - light CDR1
RASQNIGSRLA

SEQ ID NO: 979 - protein, 11 aa, Artificial Sequence
  Synthesized molecular recognition unit - light CDR1
RASQNINNYLA

SEQ ID NO: 980 - protein, 11 aa, Artificial Sequence
  Synthesized molecular recognition unit - light CDR1
RASQNVNDWLA

SEQ ID NO: 981 - protein, 11 aa, Artificial Sequence
  Synthesized molecular recognition unit - light CDR1
RASQRVGNNLA

SEQ ID NO: 982 - protein, 11 aa, Artificial Sequence
  Synthesized molecular recognition unit - light CDR1
RASQSIGRWLA

SEQ ID NO: 983 - protein, 11 aa, Artificial Sequence
  Synthesized molecular recognition unit - light CDR1
RASQSIGSNLD

SEQ ID NO: 984 - protein, 11 aa, Artificial Sequence
  Synthesized molecular recognition unit - light CDR1
RASQSIGSNLN

SEQ ID NO: 985 - protein, 11 aa, Artificial Sequence
  Synthesized molecular recognition unit - light CDR1
RASQSIGSSLH

SEQ ID NO: 986 - protein, 11 aa, Artificial Sequence
  Synthesized molecular recognition unit - light CDR1
RASQSIGTYLN

SEQ ID NO: 987 - protein, 12 aa, Artificial Sequence
  Synthesized molecular recognition unit - light CDR1
RASQSINRNYLG

SEQ ID NO: 988 - protein, 11 aa, Artificial Sequence
  Synthesized molecular recognition unit - light CDR1
RASQSINRWLA

SEQ ID NO: 989 - protein, 11 aa, Artificial Sequence
  Synthesized molecular recognition unit - light CDR1
RASQSINSNLA

SEQ ID NO: 990 - protein, 11 aa, Artificial Sequence
  Synthesized molecular recognition unit - light CDR1
RASQSISNNLN

SEQ ID NO: 991 - protein, 11 aa, Artificial Sequence
  Synthesized molecular recognition unit - light CDR1
RASQSISRSLA

SEQ ID NO: 992 - protein, 11 aa, Artificial Sequence
  Synthesized molecular recognition unit - light CDR1
RASQSISRWLA

SEQ ID NO: 993 - protein, 11 aa, Artificial Sequence
  Synthesized molecular recognition unit - light CDR1
RASQSISRYLN

SEQ ID NO: 994 - protein, 11 aa, Artificial Sequence
  Synthesized molecular recognition unit - light CDR1
RASQSISSHZN

SEQ ID NO: 995 - protein, 12 aa, Artificial Sequence
  Synthesized molecular recognition unit - light CDR1
RASQSISSKSLA

SEQ ID NO: 996 - protein, 11 aa, Artificial Sequence
  Synthesized molecular recognition unit - light CDR1
RASQSISSYLN

SEQ ID NO: 997 - protein, 11 aa, Artificial Sequence
  Synthesized molecular recognition unit - light CDR1
RASQSISTNVN

SEQ ID NO: 998 - protein, 11 aa, Artificial Sequence
  Synthesized molecular recognition unit - light CDR1
RASQSISTYLA

SEQ ID NO: 999 - protein, 11 aa, Artificial Sequence
  Synthesized molecular recognition unit - light CDR1
RASQSISTYLS

SEQ ID NO: 1000 - protein, 11 aa, Artificial Sequence
  Synthesized molecular recognition unit - light CDR1
RASQSISZWLA

SEQ ID NO: 1001 - protein, 11 aa, Artificial Sequence
  Synthesized molecular recognition unit - light CDR1
RASQSISZYZN

SEQ ID NO: 1002 - protein, 11 aa, Artificial Sequence
  Synthesized molecular recognition unit - light CDR1
RASQSIVSYLN

SEQ ID NO: 1003 - protein, 11 aa, Artificial Sequence
  Synthesized molecular recognition unit - light CDR1
RASQSIZZYZN

SEQ ID NO: 1004 - protein, 11 aa, Artificial Sequence
  Synthesized molecular recognition unit - light CDR1
RASQSLRSKLA

SEQ ID NO: 1005 - protein, 11 aa, Artificial Sequence
  Synthesized molecular recognition unit - light CDR1
RASQSVGRWMA

SEQ ID NO: 1006 - protein, 11 aa, Artificial Sequence
  Synthesized molecular recognition unit - light CDR1
RASQSVGSNLA

SEQ ID NO: 1007 - protein, 11 aa, Artificial Sequence
  Synthesized molecular recognition unit - light CDR1
RASQSVGSYLA

SEQ ID NO: 1008 - protein, 11 aa, Artificial Sequence
  Synthesized molecular recognition unit - light CDR1
RASQSVGTYLT

SEQ ID NO: 1009 - protein, 12 aa, Artificial Sequence
  Synthesized molecular recognition unit - light CDR1
RASQSVNNTYVA

SEQ ID NO: 1010 - protein, 11 aa, Artificial Sequence
  Synthesized molecular recognition unit - light CDR1
RASQSVSGYLA

SEQ ID NO: 1011 - protein, 11 aa, Artificial Sequence
  Synthesized molecular recognition unit - light CDR1
RASQSVSRKLA

SEQ ID NO: 1012 - protein, 11 aa, Artificial Sequence
  Synthesized molecular recognition unit - light CDR1
RASQSVSRNLA

SEQ ID NO: 1013 - protein, 11 aa, Artificial Sequence
  Synthesized molecular recognition unit - light CDR1
RASQSVSSDLA

SEQ ID NO: 1014 - protein, 11 aa, Artificial Sequence
  Synthesized molecular recognition unit - light CDR1
RASQSVSSNLA

SEQ ID NO: 1015 - protein, 12 aa, Artificial Sequence
  Synthesized molecular recognition unit - light CDR1
RASQSVSSNQLA

SEQ ID NO: 1016 - protein, 12 aa, Artificial Sequence
  Synthesized molecular recognition unit - light CDR1
RASQSVSSNYLS

SEQ ID NO: 1017 - protein, 12 aa, Artificial Sequence
  Synthesized molecular recognition unit - light CDR1
RASQSVSSSYLS

SEQ ID NO: 1018 - protein, 11 aa, Artificial Sequence
  Synthesized molecular recognition unit - light CDR1
RASQSVSSWLA

SEQ ID NO: 1019 - protein, 11 aa, Artificial Sequence
  Synthesized molecular recognition unit - light CDR1
RASQSVSSYLA

SEQ ID NO: 1020 - protein, 11 aa, Artificial Sequence
  Synthesized molecular recognition unit - light CDR1
RASQSVSTNLA

SEQ ID NO: 1021 - protein, 12 aa, Artificial Sequence
  Synthesized molecular recognition unit - light CDR1
RASQSVSTSYLA

SEQ ID NO: 1022 - protein, 11 aa, Artificial Sequence
  Synthesized molecular recognition unit - light CDR1
RASQSVTSSLA

SEQ ID NO: 1023 - protein, 11 aa, Artificial Sequence
  Synthesized molecular recognition unit - light CDR1
RASQTINNQLA

SEQ ID NO: 1024 - protein, 11 aa, Artificial Sequence
  Synthesized molecular recognition unit - light CDR1
RASQTISRYLN

SEQ ID NO: 1025 - protein, 11 aa, Artificial Sequence
  Synthesized molecular recognition unit - light CDR1
RASQZVSRZZA

SEQ ID NO: 1026 - protein, 11 aa, Artificial Sequence
  Synthesized molecular recognition unit - light CDR1
RASRSISSYFN

SEQ ID NO: 1027 - protein, 11 aa, Artificial Sequence
  Synthesized molecular recognition unit - light CDR1
RATQTISTYLN

SEQ ID NO: 1028 - protein, 16 aa, Artificial Sequence
  Synthesized molecular recognition unit - light CDR1
RSSESLLHSDGKTYLY

SEQ ID NO: 1029 - protein, 11 aa, Artificial Sequence
  Synthesized molecular recognition unit - light CDR1
RSSQNIFQSLN

SEQ ID NO: 1030 - protein, 11 aa, Artificial Sequence
  Synthesized molecular recognition unit - light CDR1
RSSQNVSSYLA

SEQ ID NO: 1031 - protein, 17 aa, Artificial Sequence
  Synthesized molecular recognition unit - light CDR1
RSSQSLLDSDDGNTYLD

SEQ ID NO: 1032 - protein, 16 aa, Artificial Sequence
  Synthesized molecular recognition unit - light CDR1
RSSQSLLHSDGKTYLY

SEQ ID NO: 1033 - protein, 16 aa, Artificial Sequence
  Synthesized molecular recognition unit - light CDR1
RSSQSLLHSDGYTYLY

SEQ ID NO: 1034 - protein, 16 aa, Artificial Sequence
  Synthesized molecular recognition unit - light CDR1
RSSQSLLHSNGFNYVD

SEQ ID NO: 1035 - protein, 16 aa, Artificial Sequence
  Synthesized molecular recognition unit - light CDR1
RSSQSLLHSNGNTYLD

SEQ ID NO: 1036 - protein, 16 aa, Artificial Sequence
  Synthesized molecular recognition unit - light CDR1
RSSQSLLHSNGYNYLD

SEQ ID NO: 1037 - protein, 16 aa, Artificial Sequence
  Synthesized molecular recognition unit - light CDR1
RSSQSLLRRNGHNYVD

SEQ ID NO: 1038 - protein, 16 aa, Artificial Sequence
  Synthesized molecular recognition unit - light CDR1
RSSQSLVHSDGNTYLS

SEQ ID NO: 1039 - protein, 12 aa, Artificial Sequence
  Synthesized molecular recognition unit - light CDR1
RSSQYLSSAYLA

SEQ ID NO: 1040 - protein, 17 aa, Artificial Sequence
  Synthesized molecular recognition unit - light CDR1
RSSRSLLDTDDGNTYLD

SEQ ID NO: 1041 - protein, 16 aa, Artificial Sequence
  Synthesized molecular recognition unit - light CDR1
RSSRSLLHSDGKTYLY

SEQ ID NO: 1042 - protein, 16 aa, Artificial Sequence
  Synthesized molecular recognition unit - light CDR1
RSSRSLLHSNGNTYLQ

SEQ ID NO: 1043 - protein, 16 aa, Artificial Sequence
  Synthesized molecular recognition unit - light CDR1
RSSRSLLHSNGNTYLR

SEQ ID NO: 1044 - protein, 16 aa, Artificial Sequence
  Synthesized molecular recognition unit - light CDR1
RSSRSLLHTNGYNYLD

SEQ ID NO: 1045 - protein, 16 aa, Artificial Sequence
  Synthesized molecular recognition unit - light CDR1
RSSRSLLHTSGYNYLD

SEQ ID NO: 1046 - protein, 12 aa, Artificial Sequence
  Synthesized molecular recognition unit - light CDR1
RTSERSSISSFA

SEQ ID NO: 1047 - protein, 11 aa, Artificial Sequence
  Synthesized molecular recognition unit - light CDR1
RTSQSISSYLN

SEQ ID NO: 1048 - protein, 11 aa, Artificial Sequence
  Synthesized molecular recognition unit - light CDR1
RTSQSVSSNLA

SEQ ID NO: 1049 - protein, 11 aa, Artificial Sequence
  Synthesized molecular recognition unit - light CDR1
RVSQGISSALA

SEQ ID NO: 1050 - protein, 11 aa, Artificial Sequence
  Synthesized molecular recognition unit - light CDR1
SGDKVGHKYAS

SEQ ID NO: 1051 - protein, 11 aa, Artificial Sequence
  Synthesized molecular recognition unit - light CDR1
SGNTLGSHYVS

SEQ ID NO: 1052 - protein, 13 aa, Artificial Sequence
  Synthesized molecular recognition unit - light CDR1
SGSSSNIGSHTVS

SEQ ID NO: 1053 - protein, 14 aa, Artificial Sequence
  Synthesized molecular recognition unit - light CDR1
SGTSSNIGAGYDVH

SEQ ID NO: 1054 - protein, 14 aa, Artificial Sequence
  Synthesized molecular recognition unit - light CDR1
TGSSSNIGAGFGVH

SEQ ID NO: 1055 - protein, 14 aa, Artificial Sequence
  Synthesized molecular recognition unit - light CDR1
TGTSSDVGGYNSVS

SEQ ID NO: 1056 - protein, 13 aa, Artificial Sequence
  Synthesized molecular recognition unit - light CDR1
TRSSGSIASNYVQ

SEQ ID NO: 1057 - protein, 14 aa, Artificial Sequence
  Synthesized molecular recognition unit - light CDR1
TRSSSNIGAGYDVH

SEQ ID NO: 1058 - protein, 16 aa, Artificial Sequence
  Synthesized molecular recognition unit - light CDR1
TSSQSLLHSDGKTYLY

SEQ ID NO: 1059 - protein, 11 aa, Artificial Sequence
  Synthesized molecular recognition unit - light CDR1
ZACLRIISYLN

SEQ ID NO: 1060 - protein, 11 aa, Artificial Sequence
  Synthesized molecular recognition unit - light CDR1
ZPZQTZZSHLN

SEQ ID NO: 1061 - protein, 7 aa, Artificial Sequence
  Synthesized molecular recognition unit - light CDR2
AASALQS

SEQ ID NO: 1062 - protein, 7 aa, Artificial Sequence
  Synthesized molecular recognition unit - light CDR2
AASNLET

SEQ ID NO: 1063 - protein, 7 aa, Artificial Sequence
  Synthesized molecular recognition unit - light CDR2
AASNLLG

SEQ ID NO: 1064 - protein, 7 aa, Artificial Sequence
  Synthesized molecular recognition unit - light CDR2
AASNLQL

SEQ ID NO: 1065 - protein, 7 aa, Artificial Sequence
  Synthesized molecular recognition unit - light CDR2
AASNLQS

SEQ ID NO: 1066 - protein, 7 aa, Artificial Sequence
  Synthesized molecular recognition unit - light CDR2
AASRLES

SEQ ID NO: 1067 - protein, 7 aa, Artificial Sequence
  Synthesized molecular recognition unit - light CDR2
AASRLQS

SEQ ID NO: 1068 - protein, 7 aa, Artificial Sequence
  Synthesized molecular recognition unit - light CDR2
AASRRAT

SEQ ID NO: 1069 - protein, 7 aa, Artificial Sequence
  Synthesized molecular recognition unit - light CDR2
AASSLHT

SEQ ID NO: 1070 - protein, 7 aa, Artificial Sequence
  Synthesized molecular recognition unit - light CDR2
AASSLQR

SEQ ID NO: 1071 - protein, 7 aa, Artificial Sequence
  Synthesized molecular recognition unit - light CDR2
AASSLQS

SEQ ID NO: 1072 - protein, 7 aa, Artificial Sequence
  Synthesized molecular recognition unit - light CDR2
AASSRVT

SEQ ID NO: 1073 - protein, 7 aa, Artificial Sequence
  Synthesized molecular recognition unit - light CDR2
AASTLES

SEQ ID NO: 1074 - protein, 7 aa, Artificial Sequence
  Synthesized molecular recognition unit - light CDR2
AASTLET

SEQ ID NO: 1075 - protein, 7 aa, Artificial Sequence
  Synthesized molecular recognition unit - light CDR2
AASTLQS

SEQ ID NO: 1076 - protein, 7 aa, Artificial Sequence
  Synthesized molecular recognition unit - light CDR2
AASTLQT

SEQ ID NO: 1077 - protein, 7 aa, Artificial Sequence
  Synthesized molecular recognition unit - light CDR2
AASTSQS

SEQ ID NO: 1078 - protein, 7 aa, Artificial Sequence
  Synthesized molecular recognition unit - light CDR2
ASSTLQT

SEQ ID NO: 1079 - protein, 7 aa, Artificial Sequence
  Synthesized molecular recognition unit - light CDR2
ATSTLQS

SEQ ID NO: 1080 - protein, 7 aa, Artificial Sequence
  Synthesized molecular recognition unit - light CDR2
DASIRAT

SEQ ID NO: 1081 - protein, 7 aa, Artificial Sequence
  Synthesized molecular recognition unit - light CDR2
DASNLET

SEQ ID NO: 1082 - protein, 7 aa, Artificial Sequence
  Synthesized molecular recognition unit - light CDR2
DASNLQS

SEQ ID NO: 1083 - protein, 7 aa, Artificial Sequence
  Synthesized molecular recognition unit - light CDR2
DASNRAS

SEQ ID NO: 1084 - protein, 7 aa, Artificial Sequence
  Synthesized molecular recognition unit - light CDR2
DASNRAT

SEQ ID NO: 1085 - protein, 7 aa, Artificial Sequence
  Synthesized molecular recognition unit - light CDR2
DASSLES

SEQ ID NO: 1086 - protein, 7 aa, Artificial Sequence
  Synthesized molecular recognition unit - light CDR2
DASSLQS

SEQ ID NO: 1087 - protein, 7 aa, Artificial Sequence
  Synthesized molecular recognition unit - light CDR2
DASTLET

SEQ ID NO: 1088 - protein, 7 aa, Artificial Sequence
  Synthesized molecular recognition unit - light CDR2
DASTLKR

SEQ ID NO: 1089 - protein, 7 aa, Artificial Sequence
  Synthesized molecular recognition unit - light CDR2
DASTLQT

SEQ ID NO: 1090 - protein, 7 aa, Artificial Sequence
  Synthesized molecular recognition unit - light CDR2
DTSNRAT

SEQ ID NO: 1091 - protein, 7 aa, Artificial Sequence
  Synthesized molecular recognition unit - light CDR2
DVSNLER

SEQ ID NO: 1092 - protein, 7 aa, Artificial Sequence
  Synthesized molecular recognition unit - light CDR2
DVTKRPS

SEQ ID NO: 1093 - protein, 7 aa, Artificial Sequence
  Synthesized molecular recognition unit - light CDR2
EASSVAS

SEQ ID NO: 1094 - protein, 7 aa, Artificial Sequence
  Synthesized molecular recognition unit - light CDR2
EASTLQS

SEQ ID NO: 1095 - protein, 7 aa, Artificial Sequence
  Synthesized molecular recognition unit - light CDR2
EDSQRPS

SEQ ID NO: 1096 - protein, 7 aa, Artificial Sequence
  Synthesized molecular recognition unit - light CDR2
ENDKRPS

SEQ ID NO: 1097 - protein, 7 aa, Artificial Sequence
  Synthesized molecular recognition unit - light CDR2
EVSSLQG

SEQ ID NO: 1098 - protein, 7 aa, Artificial Sequence
  Synthesized molecular recognition unit - light CDR2
EVSSVQG

SEQ ID NO: 1099 - protein, 7 aa, Artificial Sequence
  Synthesized molecular recognition unit - light CDR2
FASSLQS

SEQ ID NO: 1100 - protein, 7 aa, Artificial Sequence
  Synthesized molecular recognition unit - light CDR2
FGSYRAS

SEQ ID NO: 1101 - protein, 7 aa, Artificial Sequence
  Synthesized molecular recognition unit - light CDR2
GASNLQS

SEQ ID NO: 1102 - protein, 7 aa, Artificial Sequence
  Synthesized molecular recognition unit - light CDR2
GASNRAS

SEQ ID NO: 1103 - protein, 7 aa, Artificial Sequence
  Synthesized molecular recognition unit - light CDR2
GASNRPT

SEQ ID NO: 1104 - protein, 7 aa, Artificial Sequence
  Synthesized molecular recognition unit - light CDR2
GASSLES

SEQ ID NO: 1105 - protein, 7 aa, Artificial Sequence
  Synthesized molecular recognition unit - light CDR2
GASSLQS

SEQ ID NO: 1106 - protein, 7 aa, Artificial Sequence
  Synthesized molecular recognition unit - light CDR2
GASSRAP

SEQ ID NO: 1107 - protein, 7 aa, Artificial Sequence
  Synthesized molecular recognition unit - light CDR2
GASSRAT

SEQ ID NO: 1108 - protein, 7 aa, Artificial Sequence
  Synthesized molecular recognition unit - light CDR2
GASTLQR

SEQ ID NO: 1109 - protein, 7 aa, Artificial Sequence
  Synthesized molecular recognition unit - light CDR2
GASTLQS

SEQ ID NO: 1110 - protein, 7 aa, Artificial Sequence
  Synthesized molecular recognition unit - light CDR2
GASTRAA

SEQ ID NO: 1111 - protein, 7 aa, Artificial Sequence
  Synthesized molecular recognition unit - light CDR2
GASTRAT

SEQ ID NO: 1112 - protein, 7 aa, Artificial Sequence
  Synthesized molecular recognition unit - light CDR2
GASTVES

SEQ ID NO: 1113 - protein, 7 aa, Artificial Sequence
  Synthesized molecular recognition unit - light CDR2
GNNNRPS

SEQ ID NO: 1114 - protein, 7 aa, Artificial Sequence
  Synthesized molecular recognition unit - light CDR2
GNSIRPS

SEQ ID NO: 1115 - protein, 7 aa, Artificial Sequence
  Synthesized molecular recognition unit - light CDR2
GSSNRAA

SEQ ID NO: 1116 - protein, 7 aa, Artificial Sequence
  Synthesized molecular recognition unit - light CDR2
GTSTRAT

SEQ ID NO: 1117 - protein, 7 aa, Artificial Sequence
  Synthesized molecular recognition unit - light CDR2
GVSNRAT

SEQ ID NO: 1118 - protein, 7 aa, Artificial Sequence
  Synthesized molecular recognition unit - light CDR2
KASNLET

SEQ ID NO: 1119 - protein, 7 aa, Artificial Sequence
  Synthesized molecular recognition unit - light CDR2
KASSLEN

SEQ ID NO: 1120 - protein, 7 aa, Artificial Sequence
  Synthesized molecular recognition unit - light CDR2
KASSLES

SEQ ID NO: 1121 - protein, 7 aa, Artificial Sequence
  Synthesized molecular recognition unit - light CDR2
KASSLQS

SEQ ID NO: 1122 - protein, 7 aa, Artificial Sequence
  Synthesized molecular recognition unit - light CDR2
KASTLDT

SEQ ID NO: 1123 - protein, 7 aa, Artificial Sequence
  Synthesized molecular recognition unit - light CDR2
KASTLES

SEQ ID NO: 1124 - protein, 7 aa, Artificial Sequence
  Synthesized molecular recognition unit - light CDR2
KISNRFS

SEQ ID NO: 1125 - protein, 7 aa, Artificial Sequence
  Synthesized molecular recognition unit - light CDR2
LASRRAS

SEQ ID NO: 1126 - protein, 7 aa, Artificial Sequence
  Synthesized molecular recognition unit - light CDR2
LGFNRAS

SEQ ID NO: 1127 - protein, 7 aa, Artificial Sequence
  Synthesized molecular recognition unit - light CDR2
LGSDRAS

SEQ ID NO: 1128 - protein, 7 aa, Artificial Sequence
  Synthesized molecular recognition unit - light CDR2
LGSDRTS

SEQ ID NO: 1129 - protein, 7 aa, Artificial Sequence
  Synthesized molecular recognition unit - light CDR2
LGSHRAS

SEQ ID NO: 1130 - protein, 7 aa, Artificial Sequence
  Synthesized molecular recognition unit - light CDR2
LGSKRAS

SEQ ID NO: 1131 - protein, 7 aa, Artificial Sequence
  Synthesized molecular recognition unit - light CDR2
LGSNRAS

SEQ ID NO: 1132 - protein, 7 aa, Artificial Sequence
  Synthesized molecular recognition unit - light CDR2
MGSNRAP

SEQ ID NO: 1133 - protein, 7 aa, Artificial Sequence
  Synthesized molecular recognition unit - light CDR2
MGSYRAS

SEQ ID NO: 1134 - protein, 7 aa, Artificial Sequence
  Synthesized molecular recognition unit - light CDR2
MLSSRAP

SEQ ID NO: 1135 - protein, 7 aa, Artificial Sequence
  Synthesized molecular recognition unit - light CDR2
NTSNRAT

SEQ ID NO: 1136 - protein, 7 aa, Artificial Sequence
  Synthesized molecular recognition unit - light CDR2
PASSLQS

SEQ ID NO: 1137 - protein, 7 aa, Artificial Sequence
  Synthesized molecular recognition unit - light CDR2
QASNLES

SEQ ID NO: 1138 - protein, 7 aa, Artificial Sequence
  Synthesized molecular recognition unit - light CDR2
QASSLDS

SEQ ID NO: 1139 - protein, 7 aa, Artificial Sequence
  Synthesized molecular recognition unit - light CDR2
QASSLIS

SEQ ID NO: 1140 - protein, 7 aa, Artificial Sequence
  Synthesized molecular recognition unit - light CDR2
QDSKRPS

SEQ ID NO: 1141 - protein, 7 aa, Artificial Sequence
  Synthesized molecular recognition unit - light CDR2
RASSLQS

SEQ ID NO: 1142 - protein, 7 aa, Artificial Sequence
  Synthesized molecular recognition unit - light CDR2
RASTLES

SEQ ID NO: 1143 - protein, 7 aa, Artificial Sequence
  Synthesized molecular recognition unit - light CDR2
RASTLQS

SEQ ID NO: 1144 - protein, 7 aa, Artificial Sequence
  Synthesized molecular recognition unit - light CDR2
RTSTLES

SEQ ID NO: 1145 - protein, 7 aa, Artificial Sequence
  Synthesized molecular recognition unit - light CDR2
RVSSRFS

SEQ ID NO: 1146 - protein, 7 aa, Artificial Sequence
  Synthesized molecular recognition unit - light CDR2
SASNLQS

SEQ ID NO: 1147 - protein, 7 aa, Artificial Sequence
  Synthesized molecular recognition unit - light CDR2
SASRLQI

SEQ ID NO: 1148 - protein, 7 aa, Artificial Sequence
  Synthesized molecular recognition unit - light CDR2
SASSLQS

SEQ ID NO: 1149 - protein, 7 aa, Artificial Sequence
  Synthesized molecular recognition unit - light CDR2
SDRNRPS

SEQ ID NO: 1150 - protein, 7 aa, Artificial Sequence
  Synthesized molecular recognition unit - light CDR2
SNYQRPS

SEQ ID NO: 1151 - protein, 7 aa, Artificial Sequence
  Synthesized molecular recognition unit - light CDR2
STNTRSS

SEQ ID NO: 1152 - protein, 7 aa, Artificial Sequence
  Synthesized molecular recognition unit - light CDR2
TASSLQS

SEQ ID NO: 1153 - protein, 7 aa, Artificial Sequence
  Synthesized molecular recognition unit - light CDR2
TLSHRAS

SEQ ID NO: 1154 - protein, 7 aa, Artificial Sequence
  Synthesized molecular recognition unit - light CDR2
YASQSVS

SEQ ID NO: 1155 - protein, 7 aa, Artificial Sequence
  Synthesized molecular recognition unit - light CDR2
YASSLQN

SEQ ID NO: 1156 - protein, 7 aa, Artificial Sequence
  Synthesized molecular recognition unit - light CDR2
YASSLQS

SEQ ID NO: 1157 - protein, 7 aa, Artificial Sequence
  Synthesized molecular recognition unit - light CDR2
YTNTRSS

SEQ ID NO: 1158 - protein, 7 aa, Artificial Sequence
  Synthesized molecular recognition unit - light CDR2
ZASSLQS

SEQ ID NO: 1159 - protein, 14 aa, Artificial Sequence
  Synthesized molecular recognition unit - light CDR3
CAAWDGSLFGHWVF

SEQ ID NO: 1160 - protein, 9 aa, Artificial Sequence
  Synthesized molecular recognition unit - light CDR3
CFSYAGSRF

SEQ ID NO: 1161 - protein, 13 aa, Artificial Sequence [sequence omitted]

SEQ ID NO: 1162 - protein, 11 aa, Artificial Sequence
  Synthesized molecular recognition unit - light CDR3
CHQSGRVPVTF

SEQ ID NO: 1163 - protein, 11 aa, Artificial Sequence [sequence omitted]

SEQ ID NO: 1164 - protein, 11 aa, Artificial Sequence
  Synthesized molecular recognition unit - light CDR3
CIQNTHWPLTR

SEQ ID NO: 1165 - protein, 12 aa, Artificial Sequence
  Synthesized molecular recognition unit - light CDR3
CLLYLGRGIWVF

SEQ ID NO: 1166 - protein, 11 aa, Artificial Sequence [sequence omitted]

SEQ ID NO: 1167 - protein, 11 aa, Artificial Sequence [sequence omitted]

SEQ ID NO: 1168 - protein, 11 aa, Artificial Sequence [sequence omitted]

SEQ ID NO: 1169 - protein, 11 aa, Artificial Sequence [sequence omitted]

SEQ ID NO: 1170 - protein, 10 aa, Artificial Sequence
  Synthesized molecular recognition unit - light CDR3
CLQHKSFPTF

SEQ ID NO: 1171 - protein, 11 aa, Artificial Sequence
  Synthesized molecular recognition unit - light CDR3
CLQHNGYPITF

SEQ ID NO: 1172 - protein, 11 aa, Artificial Sequence
  Synthesized molecular recognition unit - light CDR3
CLQHNSLPFTF

SEQ ID NO: 1173 - protein, 11 aa, Artificial Sequence
  Synthesized molecular recognition unit - light CDR3
CMHGLHPPFTF

SEQ ID NO: 1174 - protein, 11 aa, Artificial Sequence [sequence omitted]

SEQ ID NO: 1175 - protein, 11 aa, Artificial Sequence [sequence omitted]

SEQ ID NO: 1176 - protein, 11 aa, Artificial Sequence [sequence omitted]

SEQ ID NO: 1177 - protein, 11 aa, Artificial Sequence [sequence omitted]

SEQ ID NO: 1178 - protein, 11 aa, Artificial Sequence [sequence omitted]

SEQ ID NO: 1179 - protein, 11 aa, Artificial Sequence [sequence omitted]

SEQ ID NO: 1180 - protein, 11 aa, Artificial Sequence [sequence omitted]

SEQ ID NO: 1181 - protein, 11 aa, Artificial Sequence [sequence omitted]

SEQ ID NO: 1182 - protein, 11 aa, Artificial Sequence [sequence omitted]

SEQ ID NO: 1183 - protein, 10 aa, Artificial Sequence [sequence omitted]

SEQ ID NO: 1184 - protein, 11 aa, Artificial Sequence [sequence omitted]

SEQ ID NO: 1185 - protein, 11 aa, Artificial Sequence
  Synthesized molecular recognition unit - light CDR3
CMQNTHWPLTL

SEQ ID NO: 1186 - protein, 11 aa, Artificial Sequence
  Synthesized molecular recognition unit - light CDR3
CMQNTHWPLTR

SEQ ID NO: 1187 - protein, 11 aa, Artificial Sequence [sequence omitted]

SEQ ID NO: 1188 - protein, 11 aa, Artificial Sequence [sequence omitted]

SEQ ID NO: 1189 - protein, 11 aa, Artificial Sequence
  Synthesized molecular recognition unit - light CDR3
CMQSLQSPLTF

SEQ ID NO: 1190 - protein, 11 aa, Artificial Sequence [sequence omitted]

SEQ ID NO: 1191 - protein, 11 aa, Artificial Sequence
  Synthesized molecular recognition unit - light CDR3
CMQSSHWPKTF

SEQ ID NO: 1192 - protein, 11 aa, Artificial Sequence
  Synthesized molecular recognition unit - light CDR3
CMQTLKAPLTF

SEQ ID NO: 1193 - protein, 13 aa, Artificial Sequence
  Synthesized molecular recognition unit - light CDR3
CNSRDNSGKHKVF

SEQ ID NO: 1194 - protein, 12 aa, Artificial Sequence [sequence omitted]

SEQ ID NO: 1195 - protein, 11 aa, Artificial Sequence [sequence omitted]

SEQ ID NO: 1196 - protein, 11 aa, Artificial Sequence
  Synthesized molecular recognition unit - light CDR3
CQHLNNFPLTF

SEQ ID NO: 1197 - protein, 13 aa, Artificial Sequence
  Synthesized molecular recognition unit - light CDR3
CQHLNSYPPGDTF

SEQ ID NO: 1198 - protein, 11 aa, Artificial Sequence
  Synthesized molecular recognition unit - light CDR3
CQHRANWPQTF

SEQ ID NO: 1199 - protein, 7 aa, Artificial Sequence
  Synthesized molecular recognition unit - light CDR3
CQHRNFF

SEQ ID NO: 1200 - protein, 11 aa, Artificial Sequence
  Synthesized molecular recognition unit - light CDR3
CQHRTSWPLTF

SEQ ID NO: 1201 - protein, 11 aa, Artificial Sequence [sequence omitted]

SEQ ID NO: 1202 - protein, 11 aa, Artificial Sequence [sequence omitted]

SEQ ID NO: 1203 - protein, 11 aa, Artificial Sequence [sequence omitted]

SEQ ID NO: 1204 - protein, 11 aa, Artificial Sequence [sequence omitted]

SEQ ID NO: 1205 - protein, 11 aa, Artificial Sequence [sequence omitted]

SEQ ID NO: 1206 - protein, 11 aa, Artificial Sequence
  Synthesized molecular recognition unit - light CDR3
CQQADTFPPTF

SEQ ID NO: 1207 - protein, 11 aa, Artificial Sequence [sequence omitted]

SEQ ID NO: 1208 - protein, 11 aa, Artificial Sequence [sequence omitted]

SEQ ID NO: 1209 - protein, 11 aa, Artificial Sequence [sequence omitted]

SEQ ID NO: 1210 - protein, 11 aa, Artificial Sequence [sequence omitted]

SEQ ID NO: 1211 - protein, 11 aa, Artificial Sequence [sequence omitted]

SEQ ID NO: 1212 - protein, 11 aa, Artificial Sequence [sequence omitted]

SEQ ID NO: 1213 - protein, 11 aa, Artificial Sequence [sequence omitted]

SEQ ID NO: 1214 - protein, 11 aa, Artificial Sequence
  Synthesized molecular recognition unit - light CDR3
CQQANTVPFTF

SEQ ID NO: 1215 - protein, 11 aa, Artificial Sequence
  Synthesized molecular recognition unit - light CDR3
CQQAYSFPQTF

SEQ ID NO: 1216 - protein, 11 aa, Artificial Sequence
  Synthesized molecular recognition unit - light CDR3
CQQAYSFPWTF

SEQ ID NO: 1217 - protein, 11 aa, Artificial Sequence
  Synthesized molecular recognition unit - light CDR3
CQQGFNFPLTF

SEQ ID NO: 1218 - protein, 11 aa, Artificial Sequence [sequence omitted]

SEQ ID NO: 1219 - protein, 11 aa, Artificial Sequence
  Synthesized molecular recognition unit - light CDR3
CQQGYNIPWTF

SEQ ID NO: 1220 - protein, 11 aa, Artificial Sequence
  Synthesized molecular recognition unit - light CDR3
CQQGYSAPWTF

SEQ ID NO: 1221 - protein, 11 aa, Artificial Sequence [sequence omitted]

SEQ ID NO: 1222 - protein, 11 aa, Artificial Sequence
  Synthesized molecular recognition unit - light CDR3
CQQLSRYPSLF

SEQ ID NO: 1223 - protein, 11 aa, Artificial Sequence
  Synthesized molecular recognition unit - light CDR3
CQQNDYLPLTF

SEQ ID NO: 1224 - protein, 11 aa, Artificial Sequence
  Synthesized molecular recognition unit - light CDR3
CQQNYATPRTF

SEQ ID NO: 1225 - protein, 11 aa, Artificial Sequence [sequence omitted]

SEQ ID NO: 1226 - protein, 11 aa, Artificial Sequence [sequence omitted]

SEQ ID NO: 1227 - protein, 13 aa, Artificial Sequence [sequence omitted]

SEQ ID NO: 1228 - protein, 13 aa, Artificial Sequence
  Synthesized molecular recognition unit - light CDR3
CQQRTNWPPRVTF

SEQ ID NO: 1229 - protein, 10 aa, Artificial Sequence
  Synthesized molecular recognition unit - light CDR3
CQQRYKSYTF

SEQ ID NO: 1230 - protein, 13 aa, Artificial Sequence
  Synthesized molecular recognition unit - light CDR3
CQQRYNWPPSITF

SEQ ID NO: 1231 - protein, 11 aa, Artificial Sequence [sequence omitted]

SEQ ID NO: 1232 - protein, 11 aa, Artificial Sequence
  Synthesized molecular recognition unit - light CDR3
CQQSFIMPLTF

SEQ ID NO: 1233 - protein, 11 aa, Artificial Sequence [sequence omitted]

SEQ ID NO: 1234 - protein, 10 aa, Artificial Sequence [sequence omitted]

SEQ ID NO: 1235 - protein, 11 aa, Artificial Sequence [sequence omitted]

SEQ ID NO: 1236 - protein, 11 aa, Artificial Sequence
  Synthesized molecular recognition unit - light CDR3
CQQSHSPPGTF

SEQ ID NO: 1237 - protein, 11 aa, Artificial Sequence [sequence omitted]

SEQ ID NO: 1238 - protein, 10 aa, Artificial Sequence
  Synthesized molecular recognition unit - light CDR3
CQQSSRFWTF

SEQ ID NO: 1239 - protein, 11 aa, Artificial Sequence [sequence omitted]

SEQ ID NO: 1240 - protein, 11 aa, Artificial Sequence [sequence omitted]

SEQ ID NO: 1241 - protein, 11 aa, Artificial Sequence [sequence omitted]

SEQ ID NO: 1242 - protein, 11 aa, Artificial Sequence [sequence omitted]

SEQ ID NO: 1243 - protein, 11 aa, Artificial Sequence [sequence omitted]

SEQ ID NO: 1244 - protein, 11 aa, Artificial Sequence [sequence omitted]

SEQ ID NO: 1245 - protein, 11 aa, Artificial Sequence [sequence omitted]

SEQ ID NO: 1246 - protein, 11 aa, Artificial Sequence [sequence omitted]

SEQ ID NO: 1247 - protein, 11 aa, Artificial Sequence [sequence omitted]

SEQ ID NO: 1248 - protein, 11 aa, Artificial Sequence [sequence omitted]

SEQ ID NO: 1249 - protein, 12 aa, Artificial Sequence
  Synthesized molecular recognition unit - light CDR3
CQQSYSHTAFTF

SEQ ID NO: 1250 - protein, 11 aa, Artificial Sequence [sequence omitted]

SEQ ID NO: 1251 - protein, 10 aa, Artificial Sequence [sequence omitted]

SEQ ID NO: 1252 - protein, 11 aa, Artificial Sequence [sequence omitted]

SEQ ID NO: 1253 - protein, 11 aa, Artificial Sequence [sequence omitted]

SEQ ID NO: 1254 - protein, 11 aa, Artificial Sequence [sequence omitted]

SEQ ID NO: 1255 - protein, 11 aa, Artificial Sequence [sequence omitted]

SEQ ID NO: 1256 - protein, 12 aa, Artificial Sequence [sequence omitted]

SEQ ID NO: 1257 - protein, 11 aa, Artificial Sequence [sequence omitted]

SEQ ID NO: 1258 - protein, 11 aa, Artificial Sequence [sequence omitted]

SEQ ID NO: 1259 - protein, 12 aa, Artificial Sequence [sequence omitted]

SEQ ID NO: 1260 - protein, 11 aa, Artificial Sequence [sequence omitted]

SEQ ID NO: 1261 - protein, 11 aa, Artificial Sequence [sequence omitted]

SEQ ID NO: 1262 - protein, 11 aa, Artificial Sequence [sequence omitted]

SEQ ID NO: 1263 - protein, 12 aa, Artificial Sequence [sequence omitted]

SEQ ID NO: 1264 - protein, 11 aa, Artificial Sequence [sequence omitted]

SEQ ID NO: 1265 - protein, 11 aa, Artificial Sequence
  Synthesized molecular recognition unit - light CDR3
CQQSYSTPRTF

SEQ ID NO: 1266 - protein, 12 aa, Artificial Sequence [sequence omitted]

SEQ ID NO: 1267 - protein, 10 aa, Artificial Sequence [sequence omitted]

SEQ ID NO: 1268 - protein, 10 aa, Artificial Sequence [sequence omitted]

SEQ ID NO: 1269 - protein, 11 aa, Artificial Sequence [sequence omitted]

SEQ ID NO: 1270 - protein, 11 aa, Artificial Sequence [sequence omitted]

SEQ ID NO: 1271 - protein, 11 aa, Artificial Sequence [sequence omitted]

SEQ ID NO: 1272 - protein, 11 aa, Artificial Sequence [sequence omitted]

SEQ ID NO: 1273 - protein, 13 aa, Artificial Sequence
  Synthesized molecular recognition unit - light CDR3
CQQSYTSTPLNSF

SEQ ID NO: 1274 - protein, 11 aa, Artificial Sequence [sequence omitted]

SEQ ID NO: 1275 - protein, 11 aa, Artificial Sequence
  Synthesized molecular recognition unit - light CDR3
CQQTFSPPLTF

SEQ ID NO: 1276 - protein, 11 aa, Artificial Sequence
  Synthesized molecular recognition unit - light CDR3
CQQTFSVPWTF

SEQ ID NO: 1277 - protein, 11 aa, Artificial Sequence
  Synthesized molecular recognition unit - light CDR3
CQQTNLFPYTF

SEQ ID NO: 1278 - protein, 11 aa, Artificial Sequence
  Synthesized molecular recognition unit - light CDR3
CQQTNTFPFTF

SEQ ID NO: 1279 - protein, 11 aa, Artificial Sequence [sequence omitted]

SEQ ID NO: 1280 - protein, 11 aa, Artificial Sequence
  Synthesized molecular recognition unit - light CDR3
CQQTYNIPITF

SEQ ID NO: 1281 - protein, 11 aa, Artificial Sequence
  Synthesized molecular recognition unit - light CDR3
CQQTYNPPRTF

SEQ ID NO: 1282 - protein, 11 aa, Artificial Sequence [sequence omitted]

SEQ ID NO: 1283 - protein, 11 aa, Artificial Sequence [sequence omitted]

SEQ ID NO: 1284 - protein, 11 aa, Artificial Sequence
  Synthesized molecular recognition unit - light CDR3
CQQTYSMPITF

SEQ ID NO: 1285 - protein, 11 aa, Artificial Sequence [sequence omitted]

SEQ ID NO: 1286 - protein, 11 aa, Artificial Sequence [sequence omitted]

SEQ ID NO: 1287 - protein, 11 aa, Artificial Sequence [sequence omitted]

SEQ ID NO: 1288 - protein, 11 aa, Artificial Sequence [sequence omitted]

SEQ ID NO: 1289 - protein, 11 aa, Artificial Sequence [sequence omitted]

SEQ ID NO: 1290 - protein, 10 aa, Artificial Sequence [sequence omitted]

SEQ ID NO: 1291 - protein, 11 aa, Artificial Sequence [sequence omitted]

SEQ ID NO: 1292 - protein, 10 aa, Artificial Sequence
  Synthesized molecular recognition unit - light CDR3
CQQYAISYTF

SEQ ID NO: 1293 - protein, 11 aa, Artificial Sequence [sequence omitted]

SEQ ID NO: 1294 - protein, 11 aa, Artificial Sequence
  Synthesized molecular recognition unit - light CDR3
CQQYDSWPPTF

SEQ ID NO: 1295 - protein, 11 aa, Artificial Sequence
  Synthesized molecular recognition unit - light CDR3
CQQYDTPLRTF

SEQ ID NO: 1296 - protein, 11 aa, Artificial Sequence [sequence omitted]

SEQ ID NO: 1297 - protein, 12 aa, Artificial Sequence
  Synthesized molecular recognition unit - light CDR3
CQQYETWPVLTF

SEQ ID NO: 1298 - protein, 11 aa, Artificial Sequence [sequence omitted]

SEQ ID NO: 1299 - protein, 10 aa, Artificial Sequence
  Synthesized molecular recognition unit - light CDR3
CQQYGIAPTF

SEQ ID NO: 1300 - protein, 11 aa, Artificial Sequence [sequence omitted]

SEQ ID NO: 1301 - protein, 12 aa, Artificial Sequence [sequence omitted]

SEQ ID NO: 1302 - protein, 11 aa, Artificial Sequence [sequence omitted]

SEQ ID NO: 1303 - protein, 10 aa, Artificial Sequence [sequence omitted]

SEQ ID NO: 1304 - protein, 11 aa, Artificial Sequence [sequence omitted]

SEQ ID NO: 1305 - protein, 11 aa, Artificial Sequence [sequence omitted]

SEQ ID NO: 1306 - protein, 11 aa, Artificial Sequence [sequence omitted]

SEQ ID NO: 1307 - protein, 10 aa, Artificial Sequence [sequence omitted]

SEQ ID NO: 1308 - protein, 11 aa, Artificial Sequence [sequence omitted]

SEQ ID NO: 1309 - protein, 13 aa, Artificial Sequence
  Synthesized molecular recognition unit - light CDR3
CQQYNHWPPLFTF

SEQ ID NO: 1310 - protein, 11 aa, Artificial Sequence [sequence omitted]

SEQ ID NO: 1311 - protein, 10 aa, Artificial Sequence
  Synthesized molecular recognition unit - light CDR3
CQQYNKSPSF

SEQ ID NO: 1312 - protein, 13 aa, Artificial Sequence
  Synthesized molecular recognition unit - light CDR3
CQQYNNWPRNYTF

SEQ ID NO: 1313 - protein, 11 aa, Artificial Sequence [sequence omitted]

SEQ ID NO: 1314 - protein, 11 aa, Artificial Sequence [sequence omitted]

SEQ ID NO: 1315 - protein, 11 aa, Artificial Sequence [sequence omitted]

SEQ ID NO: 1316 - protein, 11 aa, Artificial Sequence [sequence omitted]

SEQ ID NO: 1317 - protein, 11 aa, Artificial Sequence
  Synthesized molecular recognition unit - light CDR3
CQQYSSYPYTI

SEQ ID NO: 1318 - protein, 11 aa, Artificial Sequence
  Synthesized molecular recognition unit - light CDR3
CQQYVSYPLTF

SEQ ID NO: 1319 - protein, 11 aa, Artificial Sequence
  Synthesized molecular recognition unit - light CDR3
CQQYYSYPWTS

SEQ ID NO: 1320 - protein, 11 aa, Artificial Sequence [sequence omitted]

SEQ ID NO: 1321 - protein, 13 aa, Artificial Sequence [sequence omitted]

SEQ ID NO: 1322 - protein, 12 aa, Artificial Sequence
  Synthesized molecular recognition unit - light CDR3
CQSYDYDHRWVF

SEQ ID NO: 1323 - protein, 11 aa, Artificial Sequence [sequence omitted]

SEQ ID NO: 1324 - protein, 13 aa, Artificial Sequence [sequence omitted]

SEQ ID NO: 1325 - protein, 11 aa, Artificial Sequence
  Synthesized molecular recognition unit - light CDR3
CTQTVQFPITF

SEQ ID NO: 1326 - protein, 11 aa, Artificial Sequence
  Synthesized molecular recognition unit - light CDR3
CVQTTQSPLTF

SEQ ID NO: 1327 - protein, 9 aa, Artificial Sequence
  Synthesized molecular recognition unit - heavy CDR1
FSFSSHAMS

SEQ ID NO: 1328 - protein, 9 aa, Artificial Sequence
  Synthesized molecular recognition unit - heavy CDR1
GTFSSYAIT

SEQ ID NO: 1329 - protein, 9 aa, Artificial Sequence
  Synthesized molecular recognition unit - heavy CDR1
GTFSSYGIS

SEQ ID NO: 1330 - protein, 10 aa, Artificial Sequence
  Synthesized molecular recognition unit - heavy CDR1
GYTFTNYDIN

SEQ ID NO: 1331 - protein, 9 aa, Artificial Sequence
  Synthesized molecular recognition unit - heavy CDR1
HTFTSHYMH

SEQ ID NO: 1332 - protein, 9 aa, Artificial Sequence
  Synthesized molecular recognition unit - heavy CDR1
YMFTGHDMH

SEQ ID NO: 1333 - protein, 9 aa, Artificial Sequence
  Synthesized molecular recognition unit - heavy CDR1
YSFTGYYLH

SEQ ID NO: 1334 - protein, 9 aa, Artificial Sequence
  Synthesized molecular recognition unit - heavy CDR1
YSFTNYYMH

SEQ ID NO: 1335 - protein, 9 aa, Artificial Sequence
  Synthesized molecular recognition unit - heavy CDR1
YTFAKYYIH

SEQ ID NO: 1336 - protein, 9 aa, Artificial Sequence
  Synthesized molecular recognition unit - heavy CDR1
YTFNGYYMH

SEQ ID NO: 1337 - protein, 9 aa, Artificial Sequence
  Synthesized molecular recognition unit - heavy CDR1
YTFSRHYIH

SEQ ID NO: 1338 - protein, 9 aa, Artificial Sequence
  Synthesized molecular recognition unit - heavy CDR1
YTFTDHYFH

SEQ ID NO: 1339 - protein, 9 aa, Artificial Sequence
  Synthesized molecular recognition unit - heavy CDR1
YTFTDSYIH

SEQ ID NO: 1340 - protein, 9 aa, Artificial Sequence
  Synthesized molecular recognition unit - heavy CDR1
YTFTGHYMH

SEQ ID NO: 1341 - protein, 9 aa, Artificial Sequence
  Synthesized molecular recognition unit - heavy CDR1
YTFTGYYIH

SEQ ID NO: 1342 - protein, 9 aa, Artificial Sequence
  Synthesized molecular recognition unit - heavy CDR1
YTFTGYYMH

SEQ ID NO: 1343 - protein, 9 aa, Artificial Sequence
  Synthesized molecular recognition unit - heavy CDR1
YTFTNYYMH

SEQ ID NO: 1344 - protein, 9 aa, Artificial Sequence
  Synthesized molecular recognition unit - heavy CDR1
YTFTRYYIH

SEQ ID NO: 1345 - protein, 9 aa, Artificial Sequence
  Synthesized molecular recognition unit - heavy CDR1
YTFTRYYLH

SEQ ID NO: 1346 - protein, 9 aa, Artificial Sequence
  Synthesized molecular recognition unit - heavy CDR1
YTFTSSYIH

SEQ ID NO: 1347 - protein, 9 aa, Artificial Sequence
  Synthesized molecular recognition unit - heavy CDR1
YWFTASYMH

SEQ ID NO: 1348 - protein, 13 aa, Artificial Sequence
  Synthesized molecular recognition unit - heavy CDR2
GDIIPIFGSANYA

SEQ ID NO: 1349 - protein, 13 aa, Artificial Sequence
  Synthesized molecular recognition unit - heavy CDR2
GIINPSGGGAVYA

SEQ ID NO: 1350 - protein, 13 aa, Artificial Sequence
  Synthesized molecular recognition unit - heavy CDR2
GIINPSGGSTSYA

SEQ ID NO: 1351 - protein, 13 aa, Artificial Sequence
  Synthesized molecular recognition unit - heavy CDR2
GIVNPSGGGTNYA

SEQ ID NO: 1352 - protein, 13 aa, Artificial Sequence
  Synthesized molecular recognition unit - heavy CDR2
GRINPHNGNTNYA

SEQ ID NO: 1353 - protein, 13 aa, Artificial Sequence
  Synthesized molecular recognition unit - heavy CDR2
GWANPSSGNTGTA

SEQ ID NO: 1354 - protein, 13 aa, Artificial Sequence
  Synthesized molecular recognition unit - heavy CDR2
GWINPNSGNTGYA

SEQ ID NO: 1355 - protein, 13 aa, Artificial Sequence
  Synthesized molecular recognition unit - heavy CDR2
GWMDPNSGYTGYA

SEQ ID NO: 1356 - protein, 13 aa, Artificial Sequence
  Synthesized molecular recognition unit - heavy CDR2
GWMKPDSGNTGYA

SEQ ID NO: 1357 - protein, 13 aa, Artificial Sequence
  Synthesized molecular recognition unit - heavy CDR2
GWMNPNSANAGYA

SEQ ID NO: 1358 - protein, 13 aa, Artificial Sequence
  Synthesized molecular recognition unit - heavy CDR2
GWMNPNSGSTGYA

SEQ ID NO: 1359 - protein, 13 aa, Artificial Sequence
  Synthesized molecular recognition unit - heavy CDR2
SAISGSGHSTYYA

SEQ ID NO: 1360 - protein, 17 aa, Artificial Sequence
  Synthesized molecular recognition unit - heavy CDR2
WIYPRDGSTKYNEKFKG

SEQ ID NO: 1361 - protein, 8 aa, Artificial Sequence
  Synthesized molecular recognition unit - heavy CDR3
CANPKHYW

SEQ ID NO: 1362 - protein, 19 aa, Artificial Sequence
  Synthesized molecular recognition unit - heavy CDR3
CARANRGLRKNYYYGMDVW

SEQ ID NO: 1363 - protein, 18 aa, Artificial Sequence
  Synthesized molecular recognition unit - heavy CDR3
CARATRVSAAGTVHFQHW

SEQ ID NO: 1364 - protein, 24 aa, Artificial Sequence
  Synthesized molecular recognition unit - heavy CDR3
CARDHGTMIAVAGTFDYYYYMDVW

SEQ ID NO: 1365 - protein, 16 aa, Artificial Sequence
  Synthesized molecular recognition unit - heavy CDR3
CAREDDFWSGGGMDVW

SEQ ID NO: 1366 - protein, 15 aa, Artificial Sequence
  Synthesized molecular recognition unit - heavy CDR3
CAREGLRGWSIFDIW

SEQ ID NO: 1367 - protein, 13 aa, Artificial Sequence
  Synthesized molecular recognition unit - heavy CDR3
CARELGLGWFDPW

SEQ ID NO: 1368 - protein, 14 aa, Artificial Sequence
  Synthesized molecular recognition unit - heavy CDR3
CARGDINYGNFDYW

SEQ ID NO: 1369 - protein, 24 aa, Artificial Sequence
  Synthesized molecular recognition unit - heavy CDR3
CARGDIVATMGMKKVDYYYYMDVW

SEQ ID NO: 1370 - protein, 17 aa, Artificial Sequence
  Synthesized molecular recognition unit - heavy CDR3
CARGGHTGYSSGWYNHW

SEQ ID NO: 1371 - protein, 19 aa, Artificial Sequence
  Synthesized molecular recognition unit - heavy CDR3
CARGGNYGRWLQPWYFDLW

SEQ ID NO: 1372 - protein, 8 aa, Artificial Sequence [sequence omitted]

SEQ ID NO: 1373 - protein, 19 aa, Artificial Sequence
  Synthesized molecular recognition unit - heavy CDR3
CARGIHGDYGLDYYYMDVW

SEQ ID NO: 1374 - protein, 11 aa, Artificial Sequence [sequence omitted]

SEQ ID NO: 1375 - protein, 8 aa, Artificial Sequence
  Synthesized molecular recognition unit - heavy CDR3
CARGMEYW

SEQ ID NO: 1376 - protein, 20 aa, Artificial Sequence
  Synthesized molecular recognition unit - heavy CDR3
CARGPADFWSGYKNDYFDFW

SEQ ID NO: 1377 - protein, 11 aa, Artificial Sequence [sequence omitted]

SEQ ID NO: 1378 - protein, 15 aa, Artificial Sequence
  Synthesized molecular recognition unit - heavy CDR3
CARHKRHTPYAFDIW

SEQ ID NO: 1379 - protein, 15 aa, Artificial Sequence
  Synthesized molecular recognition unit - heavy CDR3
CARQGGSYSMGLDPW

SEQ ID NO: 1380 - protein, 15 aa, Artificial Sequence
  Synthesized molecular recognition unit - heavy CDR3
CARRSSSWGWYFDLW

SEQ ID NO: 1381 - protein, 17 aa, Artificial Sequence
  Synthesized molecular recognition unit - heavy CDR3
CARSPDFWSGEGYFDLW

SEQ ID NO: 1382 - protein, 15 aa, Artificial Sequence
  Synthesized molecular recognition unit - heavy CDR3
CARSRLRWDWYFDLW

SEQ ID NO: 1383 - protein, 15 aa, Artificial Sequence
  Synthesized molecular recognition unit - heavy CDR3
CARSYYGVIDAFDIW

SEQ ID NO: 1384 - protein, 17 aa, Artificial Sequence
  Synthesized molecular recognition unit - heavy CDR3
CARVGDYDRFNWYFDLW

SEQ ID NO: 1385 - protein, 13 aa, Artificial Sequence
  Synthesized molecular recognition unit - heavy CDR3
CARVRFLEEMDVW

SEQ ID NO: 1386 - protein, 16 aa, Artificial Sequence
  Synthesized molecular recognition unit - heavy CDR3
CARWTTVVTGAAFDIW

SEQ ID NO: 1387 - protein, 9 aa, Artificial Sequence
  Synthesized molecular recognition unit - heavy CDR3
VRSAWGFAY

SEQ ID NO: 1388 - protein, 11 aa, Artificial Sequence
  Synthesized molecular recognition unit - light CDR1
KASQDVGTAVA

SEQ ID NO: 1389 - protein, 17 aa, Artificial Sequence
  Synthesized molecular recognition unit - light CDR1
KSSQSVLHSSNNKNYLA

SEQ ID NO: 1390 - protein, 11 aa, Artificial Sequence
  Synthesized molecular recognition unit - light CDR1
RASQAIGRRLA

SEQ ID NO: 1391 - protein, 11 aa, Artificial Sequence
  Synthesized molecular recognition unit - light CDR1
RASQDISNNLN

SEQ ID NO: 1392 - protein, 11 aa, Artificial Sequence
  Synthesized molecular recognition unit - light CDR1
RASQDISRGLG

SEQ ID NO: 1393 - protein, 11 aa, Artificial Sequence
  Synthesized molecular recognition unit - light CDR1
RASQGIRNDLN

SEQ ID NO: 1394 - protein, 11 aa, Artificial Sequence
  Synthesized molecular recognition unit - light CDR1
RASQGISKYLA

SEQ ID NO: 1395 - protein, 11 aa, Artificial Sequence
  Synthesized molecular recognition unit - light CDR1
RASQGISSWLA

SEQ ID NO: 1396 - protein, 11 aa, Artificial Sequence
  Synthesized molecular recognition unit - light CDR1
RASQGVSTYLA

SEQ ID NO: 1397 - protein, 11 aa, Artificial Sequence
  Synthesized molecular recognition unit - light CDR1
RASQNINSWLA

SEQ ID NO: 1398 - protein, 11 aa, Artificial Sequence
  Synthesized molecular recognition unit - light CDR1
RASQSIARYLN

SEQ ID NO: 1399 - protein, 11 aa, Artificial Sequence
  Synthesized molecular recognition unit - light CDR1
RASQSIGNYLN

SEQ ID NO: 1400 - protein, 11 aa, Artificial Sequence
  Synthesized molecular recognition unit - light CDR1
RASQSIISYLN

SEQ ID NO: 1401 - protein, 11 aa, Artificial Sequence
  Synthesized molecular recognition unit - light CDR1
RASQSISKWLA

SEQ ID NO: 1402 - protein, 11 aa, Artificial Sequence
  Synthesized molecular recognition unit - light CDR1
RASQSITTYLN

SEQ ID NO: 1403 - protein, 11 aa, Artificial Sequence
  Synthesized molecular recognition unit - light CDR1
RASQSLSSWLA

SEQ ID NO: 1404 - protein, 11 aa, Artificial Sequence
  Synthesized molecular recognition unit - light CDR1
RASQSVSSWLA

SEQ ID NO: 1405 - protein, 11 aa, Artificial Sequence
  Synthesized molecular recognition unit - light CDR1
RASQTISSYLN

SEQ ID NO: 1406 - protein, 11 aa, Artificial Sequence
  Synthesized molecular recognition unit - light CDR1
RASRTVYNFLA

SEQ ID NO: 1407 - protein, 7 aa, Artificial Sequence
  Synthesized molecular recognition unit - light CDR2
AASRLQT

SEQ ID NO: 1408 - protein, 7 aa, Artificial Sequence
  Synthesized molecular recognition unit - light CDR2
AASSLQT

SEQ ID NO: 1409 - protein, 7 aa, Artificial Sequence
  Synthesized molecular recognition unit - light CDR2
AASTLYR

SEQ ID NO: 1410 - protein, 7 aa, Artificial Sequence
  Synthesized molecular recognition unit - light CDR2
DASNLGT

SEQ ID NO: 1411 - protein, 7 aa, Artificial Sequence
  Synthesized molecular recognition unit - light CDR2
DASNLRT

SEQ ID NO: 1412 - protein, 7 aa, Artificial Sequence
  Synthesized molecular recognition unit - light CDR2
DASTLQS

SEQ ID NO: 1413 - protein, 7 aa, Artificial Sequence
  Synthesized molecular recognition unit - light CDR2
GASALRS

SEQ ID NO: 1414 - protein, 7 aa, Artificial Sequence
  Synthesized molecular recognition unit - light CDR2
GASHLQT

SEQ ID NO: 1415 - protein, 7 aa, Artificial Sequence
  Synthesized molecular recognition unit - light CDR2
KASTLHN

SEQ ID NO: 1416 - protein, 7 aa, Artificial Sequence
  Synthesized molecular recognition unit - light CDR2
KTSSLQS

SEQ ID NO: 1417 - protein, 7 aa, Artificial Sequence
  Synthesized molecular recognition unit - light CDR2
LGSSRAS

SEQ ID NO: 1418 - protein, 7 aa, Artificial Sequence
  Synthesized molecular recognition unit - light CDR2
WASTRES

SEQ ID NO: 1419 - protein, 7 aa, Artificial Sequence
  Synthesized molecular recognition unit - light CDR2
WASTRHT

SEQ ID NO: 1420 - protein, 11 aa, Artificial Sequence [sequence omitted]

SEQ ID NO: 1421 - protein, 11 aa, Artificial Sequence
  Synthesized molecular recognition unit - light CDR3
CQQAFRFPPTF

SEQ ID NO: 1422 - protein, 11 aa, Artificial Sequence [sequence omitted]

SEQ ID NO: 1423 - protein, 11 aa, Artificial Sequence
  Synthesized molecular recognition unit - light CDR3
CQQSFRLPLTF

SEQ ID NO: 1424 - protein, 11 aa, Artificial Sequence [sequence omitted]

SEQ ID NO: 1425 - protein, 11 aa, Artificial Sequence
  Synthesized molecular recognition unit - light CDR3
CQQSSRIPPTF

SEQ ID NO: 1426 - protein, 11 aa, Artificial Sequence
  Synthesized molecular recognition unit - light CDR3
CQQSWRFPYTF

SEQ ID NO: 1427 - protein, 11 aa, Artificial Sequence
  Synthesized molecular recognition unit - light CDR3
CQQSYSTPPTF

SEQ ID NO: 1428 - protein, 11 aa, Artificial Sequence [sequence omitted]

SEQ ID NO: 1429 - protein, 11 aa, Artificial Sequence [sequence omitted]

SEQ ID NO: 1430 - protein, 10 aa, Artificial Sequence [sequence omitted]

SEQ ID NO: 1431 - protein, 11 aa, Artificial Sequence [sequence omitted]

SEQ ID NO: 1432 - protein, 11 aa, Artificial Sequence [sequence omitted]

SEQ ID NO: 1433 - protein, 11 aa, Artificial Sequence [sequence omitted]

SEQ ID NO: 1434 - protein, 11 aa, Artificial Sequence [sequence omitted]

SEQ ID NO: 1435 - protein, 9 aa, Artificial Sequence
  Synthesized molecular recognition unit - light CDR3
QQYSTYPLT

SEQ ID NO: 1436 - protein, 17 aa, Artificial Sequence
  Synthesized molecular recognition unit - Heavy CDR3
CASSAEKATYYYGMDVW

SEQ ID NO: 1437 - protein, 17 aa, Artificial Sequence
  Synthesized molecular recognition unit - Heavy CDR3
CASSKEAATYYYGMDVW

SEQ ID NO: 1438 - protein, 17 aa, Artificial Sequence
  Synthesized molecular recognition unit - Heavy CDR3
CASSKEKAAYYYGMDVW

SEQ ID NO: 1439 - protein, 17 aa, Artificial Sequence
  Synthesized molecular recognition unit - Heavy CDR3
CASSKEKATAYYGMDVW

SEQ ID NO: 1440 - protein, 17 aa, Artificial Sequence
  Synthesized molecular recognition unit - Heavy CDR3
CASSKEKATYAYGMDVW

SEQ ID NO: 1441 - protein, 17 aa, Artificial Sequence
  Synthesized molecular recognition unit - Heavy CDR3
CASSKEKATYYAGMDVW

SEQ ID NO: 1442 - protein, 17 aa, Artificial Sequence
  Synthesized molecular recognition unit - Heavy CDR3
CASSKEKATYYYAMDVW

SEQ ID NO: 1443 - protein, 17 aa, Artificial Sequence
  Synthesized molecular recognition unit - Heavy CDR3
CASSKEKATYYYGMDAW

SEQ ID NO: 1444 - protein, 12 aa, Artificial Sequence
  Synthesized molecular recognition unit - Light CDR3
CALYLGRGIWVF

SEQ ID NO: 1445 - protein, 12 aa, Artificial Sequence
  Synthesized molecular recognition unit - Light CDR3
CLAYLGRGIWVF

SEQ ID NO: 1446 - protein, 12 aa, Artificial Sequence
  Synthesized molecular recognition unit - Light CDR3
CLLALGRGIWVF

SEQ ID NO: 1447 - protein, 12 aa, Artificial Sequence
  Synthesized molecular recognition unit - Light CDR3
CLLYAGRGIWVF

SEQ ID NO: 1448 - protein, 12 aa, Artificial Sequence
  Synthesized molecular recognition unit - Light CDR3
CLLYLARGIWVF

SEQ ID NO: 1449 - protein, 12 aa, Artificial Sequence
  Synthesized molecular recognition unit - Light CDR3
CLLYLGAGIWVF

SEQ ID NO: 1450 - protein, 12 aa, Artificial Sequence
  Synthesized molecular recognition unit - Light CDR3
CLLYLGRAIWVF

SEQ ID NO: 1451 - protein, 12 aa, Artificial Sequence
  Synthesized molecular recognition unit - Light CDR3
CLLYLGRGAWVF

SEQ ID NO: 1452 - protein, 12 aa, Artificial Sequence
  Synthesized molecular recognition unit - Light CDR3
CLLYLGRGIAVF

SEQ ID NO: 1453 - protein, 12 aa, Artificial Sequence
  Synthesized molecular recognition unit - Light CDR3
CLLYLGRGIWAF

SEQ ID NO: 1454 - protein, 140 aa, Artificial Sequence
  Made in Lab - human Fzd1 fragment with His tag
QYNGERGISVPDHGYCQPISIPLCTDIAYNQTIMPNLLGHTNQEDAGLEVHQFYPLVKVQCSAELKFFLCSMYAPVCTVLEQALPPCRSLCERARQGCEALMNKFGFQWPDTLKCEKFPVHGAGELCVGQGSHHHHHHHH

SEQ ID NO: 1455 - protein, 138 aa, Artificial Sequence
  Made in Lab - human Fzd2 fragment with His tag
QFHGEKGISIPDHGFCQPISIPLCTDIAYNQTIMPNLLGHTNQEDAGLEVHQFYPLVKVQCSPELRFFLCSMYAPVCTVLEQAIPPCRSICERARQGCEALMNKFGFQWPERLRCEHFPRHGAEQICVGQHHHHHHHH

SEQ ID NO: 1456 - protein, 134 aa, Artificial Sequence
  Made in Lab - human Fzd3 fragment with His tag
HSLFSCEPITLRMCQDLPYNTTFMPNLLNHYDQQTAALAMEPFHPMVNLDCSRDFRPFLCALYAPICMEYGRVTLPCRRLCQRAYSECSKLMEMFGVPWPEDMECSRFPDCDEPYPRLVDLNLAGEHHHHHHHH

SEQ ID NO: 1457 - protein, 138 aa, Artificial Sequence
  Made in Lab - human Fzd4 fragment with His tag
GDEEERRCDPIRISMCQNLGYNVTKMPNLVGHELQTDAELQLTTFTPLIQYGCSSQLQFFLCSVYVPMCTEKINIPIGPCGGMCLSVKRRCEPVLKEFGFAWPESLNCSKFPPQNDHNHMCMEGPGDEEVHHHHHHHH

SEQ ID NO: 1458 - protein, 134 aa, Artificial Sequence
  Made in Lab - human Fzd5 fragment with His tag
ASKAPVCQEITVPMCRGIGYNLTHMPNQFNHDTQDEAGLEVHQFWPLVEIQCSPDLRFFLCSMYTPICLPDYHKPLPPCRSVCERAKAGCSPLMRQYGFAWPERMSCDRLPVLGRDAEVLCMDYNRHHHHHHHH

SEQ ID NO: 1459 - protein, 135 aa, Artificial Sequence
  Made in Lab - human Fzd6 fragment with His tag
HSLFTCEPITVPRCMKMAYNMTFFPNLMGHYDQSIAAVEMEHFLPLANLECSPNIETFLCKAFVPTCIEQIHVVPPCRKLCEKVYSDCKKLIDTFGIRWPEELECDRLQYCDETVPVTFDPHTEFLGHHHHHHHH

SEQ ID NO: 1460 - protein, 138 aa, Artificial Sequence
  Made in Lab - human Fzd7 fragment with His tag
HGEKGISVPDHGFCQPISIPLCTDIAYNQTILPNLLGHTNQEDAGLEVHQFYPLVKVQCSPELRFFLCSMYAPVCTVLDQAIPPCRSLCERARQGCEALMNKFGFQWPERLRCENFPVHGAGEICVGQNTHHHHHHHH

SEQ ID NO: 1461 - protein, 134 aa, Artificial Sequence
  Made in Lab - human Fzd8 fragment with His tag
ASAKELACQEITVPLCKGIGYNYTYMPNQFNHDTQDEAGLEVHQFWPLVEIQCSPDLKFFLCSMYTPICLEDYKKPLPPCRSVCERAKAGCAPLMRQYGFAWPDRMRCDRLPEQGNPDTLCMDYNRHHHHHHHH

SEQ ID NO: 1462 - protein, 145 aa, Artificial Sequence
  Made in Lab - human Fzd9 fragment with His tag
LEIGRFDPERGRGAAPCQAVEIPMCRGIGYNLTRMPNLLGHTSQGEAAAELAEFAPLVQYGCHSHLRFFLCSLYAPMCTDQVSTPIPACRPMCEQARLRCAPIMEQFNFGWPDSLDCARLPTRNDPHALCMEAPENAHHHHHHHH

SEQ ID NO: 1463 - protein, 141 aa, Artificial Sequence
  Made in Lab - human Fzd10 fragment with His tag
SSMDMERPGDGKCQPIEIPMCKDIGYNMTRMPNLMGHENQREAAIQLHEFAPLVEYGCHGHLRFFLCSLYAPMCTEQVSTPIPACRVMCEQARLKCSPIMEQFNFKWPDSLDCRKLPNKNDPNYLCMEAPNNGHHHHHHHH

SEQ ID NO: 1464 - protein, 213 aa, Artificial Sequence; identical to SEQ ID NO: 43
  Made in Lab - Fzd1:1RC07 complex

SEQ ID NO: 1465 - protein, 238 aa, Artificial Sequence
  Made in Lab - Fzd1:1RC07 complex
QVQLQQWGAGLLKPSETLSLTCAVSGASFSGHYWTWIRQPPGKGLEWIGEIDHTGSTNYEPSLRSRVTISVDTSKNQFSLNLKSVTAADTAVYYCARGGQGGYDWGHYHGLDVWGQGTTVTVSSASTKGPSVFPLAPSSKSTSGGTAALGCLVKDYFPEPVTVSWNSGALTSGVHTFPAVLQSSGLYSLSSVVTVPSSSLGTQTYICNVNHKPSNTKVDKKVEPKSCGSGSGHHHHHH

SEQ ID NO: 1466 - protein, 214 aa, Artificial Sequence; identical to SEQ ID NO: 47
  Made in Lab - Fzd1:R2M9 complex

SEQ ID NO: 1467 - protein, 243 aa, Artificial Sequence
  Made in lab - Fzd1:R2M9 complex
QVQLVQSGAEVKKPGSSVKVSCKASGYTFTNNFMHWVRQAPGQGLEWMGWINPNSGGTKYAQKFQGRVTITADESTSTAYMELSSLRSEDTAVYYCARSVGEVGATMLGIGVWYWFDPWGQGTLVTVSSASTKGPSVFPLAPSSKSTSGGTAALGCLVKDYFPEPVTVSWNSGALTSGVHTFPAVLQSSGLYSLSSVVTVPSSSLGTQTYICNVNHKPSNTKVDKKVEPKSCGSGSGHHHHHH

SEQ ID NO: 1468 - protein, 214 aa, Artificial Sequence; identical to SEQ ID NO: 48
  Made in Lab - Fzd4:003S-D10 complex

SEQ ID NO: 1469 - protein, 232 aa, Artificial Sequence
  Made in Lab - Fzd4:003S-D10 complex
EVQLVESGGGLVKPGGSLRLSCAASGFNFGIYSMTWVRQAPGKGLEWISYISGDSGYTNYADSVKGRFTISRDDSKNTLYLQMNSLKTEDTAVYYCARVGPGGWFDPWGQGTLVTVSSASTKGPSVFPLAPSSKSTSGGTAALGCLVKDYFPEPVTVSWNSGALTSGVHTFPAVLQSSGLYSLSSVVTVPSSSLGTQTYICNVNHKPSNTKVDKKVEPKSCGSGSGHHHHHH

SEQ ID NO: 1470 - protein, 216 aa, Artificial Sequence; identical to SEQ ID NO: 46
  Made in Lab - Fzd5:R2M3 complex

SEQ ID NO: 1471 - protein, 236 aa, Artificial Sequence
  Made in Lab - Fzd5:R2M3 complex
EVQLVQSGAEVKKPGASVKVSCKASGYTFTSYGISWVRQAPGQGLEWMGWISAYNGNTNYAQKLQGRVTMTTDTSTSTAYMELRSLRSDDTAVYYCASSKEKATYYYGMDVWGQGTTVTVSSASTKGPSVFPLAPSSKSTSGGTAALGCLVKDYFPEPVTVSWNSGALTSGVHTFPAVLQSSGLYSLSSVVTVPSSSLGTQTYICNVNHKPSNTKVDKKVEPKSCGSGSGHHHHHH

SEQ ID NO: 1472 - protein, 214 aa, Artificial Sequence
  Made in Lab - Made in Lab - Fzd5:R2M3 complex
DIQMTQSPSSLSASVGDRVTITCRASQGISSALAWYQQKPGKAPKLLIYAASSLQSGVPSRFSGSGSGTDFTLTISSLQPEDFATYYCQQTYSMPITFGQGTRLEIKRTVAAPSVFIFPPSDEQLKSGTASVVCLLNNFYPREAKVQWKVDNALQSGNSQESVTEQDSKDSTYSLSSTLTLSKADYEKHKVYACEVTHQGLSSPVTKSFNRGEC

SEQ ID NO: 1473 - protein, 234 aa, Artificial Sequence
  Made in Lab - Fzd5:R2M3 complex
QVQLVQSGAEVKKPGASVKVSCKASGYTFTSYYMHWVRQAPGQGLEWMGRINPNSGGTNYAQKFQGRVTMTRDTSTSTVYMELSSLRSEDTAVYYCARVPDFWSGYLDYWGQGTLVTVSSASTKGPSVFPLAPSSKSTSGGTAALGCLVKDYFPEPVTVSWNSGALTSGVHTFPAVLQSSGLYSLSSVVTVPSSSLGTQTYICNVNHKPSNTKVDKKVEPKSCGSGSGHHHHHH

SEQ ID NO: 1474 - protein, 214 aa, Artificial Sequence
  Made in Lab - Fzd5:004S-E05 complex
DIQMTQSPSSLSASVGDRVTITCRASQGISSALAWYQQKPGKAPKLLIYAASALQSGVPSRFSGSGSGTDFTLTISSLQPEDFATYYCQQTYSTPRTFGPGTKVDIKRTVAAPSVFIFPPSDEQLKSGTASVVCLLNNFYPREAKVQWKVDNALQSGNSQESVTEQDSKDSTYSLSSTLTLSKADYEKHKVYACEVTHQGLSSPVTKSFNRGEC

SEQ ID NO: 1475 - protein, 238 aa, Artificial Sequence
  Made in Lab - Fzd5:004S-E05 complex
EVQLVESGGGLVQPGGSLRLSCAASGFTFSTYEMNWVRQAPGKGLEWVSGVSWNGSRTHYVDSVKGRFTISRDNSKNTLYLQLNSLRAEDTAVYYCARGQSEKWWSGLYGMDVWGQGTTVTVSSASTKGPSVFPLAPSSKSTSGGTAALGCLVKDYFPEPVTVSWNSGALTSGVHTFPAVLQSSGLYSLSSVVTVPSSSLGTQTYICNVNHKPSNTKVDKKVEPKSCGSGSGHHHHHH

SEQ ID NO: 1476 - protein, 214 aa, Artificial Sequence
  Made in Lab - Fzd5:4A12  complex
DIVMTQSHKFMSTSVGDRVSITCKASQDVGTAVAWYQQKPGQSPKLLIYWASTRHTGVPDRFTGSGSGTDFTLTINNVQSEDLADYFCQQYSTYPLTFGAGTKLELKRTVAAPSVFIFPPSDEQLKSGTASVVCLLNNFYPREAKVQWKVDNALQSGNSQESVTEQDSKDSTYSLSSTLTLSKADYEKHKVYACEVTHQGLSSPVTKSFNRGEC

SEQ ID NO: 1477 - protein, 230 aa, Artificial Sequence
  Made in Lab - Fzd5:4A12  complex
QVQLQQSGPELVKPGASVKLSCKASGYTFTNYDINWVKQRPGQGLEWIGWIYPRDGSTKYNEKFKGKATLTVDTSSSTAYMELHSLTSEDSAVYFCVRSAWGFAYWGQGTLVTVSAASTKGPSVFPLAPSSKSTSGGTAALGCLVKDYFPEPVTVSWNSGALTSGVHTFPAVLQSSGLYSLSSVVTVPSSSLGTQTYICNVNHKPSNTKVDKKVEPKSCGSGSGHHHHHH

SEQ ID NO: 1478 - protein, 214 aa, Artificial Sequence; identical to SEQ ID NO: 44
  Made in Lab - Fzd9: 014S-B06 complex

SEQ ID NO: 1479 - protein, 238 aa, Artificial Sequence
  Made in Lab - Fzd9: 014S-B06 complex
EVQLVQSGGGLVKPGGSLRLSCAASGFTFSSYSMNWVRQAPGKGLEWVSYIENDGSITTYADSVKGRFTISRDDSKNTLYLQMNSLKTEDTAVYYCARAPYYYGSGSLFRLDYWGQGTLVTVSSASTKGPSVFPLAPSSKSTSGGTAALGCLVKDYFPEPVTVSWNSGALTSGVHTFPAVLQSSGLYSLSSVVTVPSSSLGTQTYICNVNHKPSNTKVDKKVEPKSCGSGSGHHHHHH

SEQ ID NO: 1480 - protein, 214 aa, Artificial Sequence
  Made in Lab - Fzd10: 005S-A07 complex
EIVLTQSPATLSVSPGERATLSCRASQSVSRNLAWYQQKPGQAPRLLIYGASTRATGIPARFSGSGSGTEFTLTISSLQSEDFAVYYCQQRSNWPITFGQGTRLEIKRTVAAPSVFIFPPSDEQLKSGTASVVCLLNNFYPREAKVQWKVDNALQSGNSQESVTEQDSKDSTYSLSSTLTLSKADYEKHKVYACEVTHQGLSSPVTKSFNRGEC

SEQ ID NO: 1481 - protein, 232 aa, Artificial Sequence
  Made in Lab - Fzd10: 005S-A07 complex
QVQLVQSGAEVKKPGSSVKVSCKASGFTFTGSAVQWVRQAPGQGLEWVGGILPIYGTTKYAQKFQGRVTITADESTSTAYMELSSLRSEDTAVYYCARGARLYGFDYWGQGTLVTVSSASTKGPSVFPLAPSSKSTSGGTAALGCLVKDYFPEPVTVSWNSGALTSGVHTFPAVLQSSGLYSLSSVVTVPSSSLGTQTYICNVNHKPSNTKVDKKVEPKSCGSGSGHHHHHH

SEQ ID NO: 1482 - protein, 214 aa, Artificial Sequence
  Made in Lab - Fzd10:005S-E12 complex
DIQMTQSPSSLSASVGDRVTITCRASQSVGRWMAWYQQKPGKAPKLLIYAASSLQSGVPSRFSGSGSGTDFTLTISSLQPEDFATYYCQQANTFPFTFGPGTKVDIKRTVAAPSVFIFPPSDEQLKSGTASVVCLLNNFYPREAKVQWKVDNALQSGNSQESVTEQDSKDSTYSLSSTLTLSKADYEKHKVYACEVTHQGLSSPVTKSFNRGEC

SEQ ID NO: 1483 - protein, 234 aa, Artificial Sequence
  Made in Lab - Fzd10:005S-E12 complex
QVQLVQSGAEVKKPGASVKVSCKASGYIFTDYYMHWVRQAPGQGLEWMGVIFPVYPTPDYAQKFQGRVTMTRDTSTSTVYMELSSLRSEDTAVYYCARGGSTGYYGMDVWGQGTTVTVSSASTKGPSVFPLAPSSKSTSGGTAALGCLVKDYFPEPVTVSWNSGALTSGVHTFPAVLQSSGLYSLSSVVTVPSSSLGTQTYICNVNHKPSNTKVDKKVEPKSCGSGSGHHHHHH

SEQ ID NO: 1484 - protein, 214 aa, Artificial Sequence
  Made in Lab - FZD3:029S-E03 COMPLEX
DIQMTQSPSSLSASVGDRVTITCRASQSISSYLNWYQQKPGKAPKLLIYAASSLQTGVPSRFSGSGSGTDFTLTISSLQPEDFATYYCQQSFRLPLTFGQGTKVEIKRTVAAPSVFIFPPSDEQLKSGTASVVCLLNNFYPREAKVQWKVDNALQSGNSQESVTEQDSKDSTYSLSSTLTLSKADYEKHKVYACEVTHQGLSSPVTKSFNRGEC

SEQ ID NO: 1485 - protein, 234 aa, Artificial Sequence
  Made in Lab - FZD3:029S-E03 COMPLEX
QVQLVQSGAEVKKPGASVKVSCKASGYTFTGYYMHWVRQAPGQGLEWMGWINPNSGNTGYAQKFQGRVTMTRDTSTSTVYMELSSLRSEDTAVYYCARSYYGVIDAFDIWGQGTMVTVSSASTKGPSVFPLAPSSKSTSGGTAALGCLVKDYFPEPVTVSWNSGALTSGVHTFPAVLQSSGLYSLSSVVTVPSSSLGTQTYICNVNHKPSNTKVDKKVEPKSCGSGSGHHHHHH

What is claimed is:

1. An isolated antibody, or an antigen-binding fragment thereof, that binds to one or more Frizzled receptor, comprising a sequence comprising:
(i) CDRH1, CDRH2 and CDRH3 sequences set forth for any of the antibodies of Table 1A;
(ii) CDRL1, CDRL2 and CDRL3 sequences set forth for any of the antibodies of Table 1A; and/or
(iii) the CDRH1, CDRH2, CDRH3, CDRL1, CDRL2, and CDRL3 sequences set forth in Table 2,
or a variant of said antibody, or antigen-binding fragment thereof, comprising one or more amino acid modifications, wherein said variant comprises less than 8 amino acid substitutions in said CDR sequences.

2. The isolated antibody, or antigen-binding fragment thereof, of claim 1, comprising a heavy chain variable region comprising an amino acid sequence having at least 90% identity to the amino acid sequence set forth in any of SEQ ID NOs:1-37, 66, 68 or 1477.

3. The isolated antibody, or antigen-binding fragment thereof, of claim 2, comprising a heavy chain variable region comprising the amino acid sequence set forth in any of SEQ ID NOs: 1-37, 66, 68 or 1477.

4. The isolated antibody, or antigen-binding fragment thereof, of any of claims 1-3, comprising a light chain variable region comprising an amino acid sequence having at least 90% identity to the amino acid sequence set forth in any of SEQ ID NOs:38-65, 67 69 or 1476.

5. The isolated antibody, or antigen-binding fragment thereof, of claim 4, comprising a light chain variable region comprising the amino acid sequence set forth in any of SEQ ID NOs: 38-65, 67 69 or 1476.

6. The isolated antibody, or antigen-binding fragment thereof, of any of claims 1-5, wherein the antibody, or antigen-binding fragment thereof, is humanized.

7. The isolated antibody, or antigen-binding fragment thereof, of any of claims 1-6, wherein the antibody, or antigen-binding fragment thereof, is a single chain antibody, a scFv, a univalent antibody lacking a hinge region, a VHH or sdAb, or a minibody.

8. The isolated antibody, or antigen-binding fragment thereof, of claim 7, wherein the antibody, or antigen-binding fragment thereof, is a VHH or sdAb.

9. The isolated antibody, or antigen-binding fragment thereof, of claim 1, wherein the antibody, or antigen-binding fragment thereof, is a Fab or a Fab′ fragment.

10. The isolated antibody, or antigen-binding fragment thereof, of any of claims 1-9, wherein the antibody, or antigen-binding fragment thereof, is a fusion protein.

11. The isolated antibody, or antigen-binding fragment thereof, of claim 10, wherein the antibody, or antigen-binding fragment thereof, is fused to a polypeptide sequence that binds LRP5 or LRP6.

12. The isolated antibody, or antigen-binding fragment thereof, of claim 11, wherein the polypeptide sequence that binds LRP5 or LRP6 is an antibody, or an antigen-binding fragment thereof, that binds to LRP5 or LRP6.

13. The isolated antibody, or antigen-binding fragment thereof, of any of claims 1-12, wherein the antibody, or antigen-binding fragment thereof, binds to one or more of Frizzled 1 (Fzd1), Frizzled 2 (Fzd2), Frizzled 3 (Fzd3), Frizzled 4 (Fzd4), Frizzled 5 (Fzd5), Frizzled 6 (Fzd6), Frizzled 7 (Fzd7), Frizzled 8 (Fzd8), Frizzled 9 (Fzd9), and Frizzled 10 (Fzd10).

14. The isolated antibody, or antigen-binding fragment thereof, of claim 13, wherein the antibody, or antigen-binding fragment thereof, binds to two or more of Frizzled 1 (Fzd1), Frizzled 2 (Fzd2), Frizzled 3 (Fzd3), Frizzled 4 (Fzd4), Frizzled 5 (Fzd5), Frizzled 6 (Fzd6), Frizzled 7 (Fzd7), Frizzled 8 (Fzd8), Frizzled 9 (Fzd9), and Frizzled 10 (Fzd10).

15. The isolated antibody, or antigen-binding fragment thereof, of claim 14, wherein the antibody, or antigen-binding fragment thereof, binds to: (i) Fzd1, Fzd2, Fzd7 and Fzd9; (ii) Fzd1, Fzd2 and Fzd7; (iii) Fzd5 and Fzd8; (iv) Fzd5, Fzd7 and Fzd8; (v) Fzd1, Fzd4, Fzd5 and Fzd8; (vi) Fzd1, Fzd2, Fzd5, Fzd7 and Fzd8; (vii) Fzd4 and Fzd9; (viii) Fzd9 and Fzd10; (ix) Fzd5, Fzd8 and Fzd10; (x) Fzd4, Fzd5 and Fzd8; (xi) Fzd1, Fzd5, Fzd7 and Fzd8; or (xii) Fzd1, Fzd2, Fzd 4, Fzd5, Fzd7, and Fzd8.

16. An isolated antibody, or an antigen-binding fragment thereof, that competes with the antibody of any of claims 1-15 for binding to a human Frizzled.

17. An isolated antibody, or antigen-binding fragment thereof, of any of claims 1-16, that binds to the Fzd with a KD of 50 μM or lower.

18. The isolated antibody, or antigen-binding fragment thereof, of any of claims 1-17, which modulates a Wnt signaling pathway in a cell, optionally a mammalian cell.

19. The isolated antibody, or antigen-binding fragment thereof, of claim 18, which increases signaling via the Wnt signaling pathway in the cell.

20. The isolated antibody, or antigen-binding fragment thereof, of claim 18, which decreases signaling via the Wnt signaling pathway in the cell.

21. The isolated antibody, or antigen-binding fragment thereof, of any of claims 18-20, wherein the Wnt signaling pathway is a canonical Wnt signaling pathway.

22. The isolated antibody, or antigen-binding fragment thereof, of any of claims 18-20, wherein the Wnt signaling pathway is a non-canonical Wnt signaling pathway

23. An isolated polynucleotide encoding the isolated antibody, or antigen-binding fragment thereof, according to any of claims 1-22.

24. An expression vector comprising the isolated polynucleotide of claim 23.

25. An isolated host cell comprising the expression vector of claim 24.

26. A pharmaceutical composition comprising a physiologically acceptable excipient, diluent, or carrier, and a therapeutically effective amount of the isolated antibody, or antigen-binding fragment thereof, according to any of claims 1-22 or 36.

27. A method for agonizing a Wnt signaling pathway in a cell, comprising contacting the cell with the isolated antibody, or antigen-binding fragment thereof, according to claim 19.

28. The method of claim 26, wherein the antibody, or antigen-binding fragment thereof, is a fusion protein comprising a polypeptide sequence that binds LRP5 or LRP6.

29. A method for inhibiting a Wnt signaling pathway in a cell, comprising contacting the cell with the isolated antibody, or antigen-binding fragment thereof, according to claim 20.

30. A method for treating a subject having a disease or disorder associated with reduced Wnt signaling, comprising administering to the subject an effective amount of the pharmaceutical composition of claim 26, wherein the isolated antibody, or antigen-binding fragment thereof is an agonist of a Wnt signaling pathway.

31. The method of claim 30, wherein the disease or disorder is selected from the group consisting of: bone fractures, stress fractures, vertebral compression fractures, osteoporosis, osteoporotic fractures, non-union fractures, delayed union fractures, spinal fusion, pre-operative optimization for spine surgeries, osteonecrosis, osseointegration of implants or orthopedic devices, osteogenesis imperfecta, bone grafts, tendon repair, tendon-bone integration, tooth growth and regeneration, maxillofacial surgery, dental implantation, periodontal diseases, maxillofacial reconstruction, osteonecrosis of the jaw, hip or femoral head, avascular necrosis, alopecia, hearing loss, vestibular hypofunction, macular degeneration, age-related macular degeneration (AMD), vitreoretinopathy, retinopathy, diabetic retinopathy, diseases of retinal degeneration, Fuchs' dystrophy, cornea diseases, stroke, traumatic brain injury, Alzheimer's disease, multiple sclerosis, diseases affecting blood brain barrier (BBB), spinal cord injuries, spinal cord diseases, oral mucositis, short bowel syndrome, inflammatory bowel diseases (IBD), Crohn's disease (CD), ulcerative colitis (UC), in particular CD with fistula formation, metabolic syndrome, dyslipidemia, diabetes, pancreatitis, exocrine pancreatic insufficiency, wound healing, diabetic foot ulcers, pressure sores, venous leg ulcers, epidermolysis bullosa, dermal hypoplasia, myocardial infarction, coronary artery disease, heart failure, hematopoietic cell disorders, immunodeficiencies, graft versus host diseases, acute kidney injuries, chronic kidney diseases, chronic obstructive pulmonary diseases (COPD), idiopathic pulmonary fibrosis, acute liver failure of all causes, acute liver failure drug-induced, alcoholic liver diseases, chronic liver failure of all causes, cirrhosis, liver fibrosis of all causes, portal hypertension, chronic liver insufficiency of all causes, nonalcoholic steatohepatitis (NASH), nonalcoholic fatty liver disease (NAFLD) (fatty liver), alcoholic hepatitis, hepatitis C virus-induced liver diseases (HCV), hepatitis B virus-induced liver diseases (HBV), other viral hepatitis (e.g., hepatitis A virus-induced liver diseases (HAV) and hepatitis D virus-induced liver diseases (HDV)), primary biliary cirrhosis, autoimmune hepatitis, livery surgery, liver injury, liver transplantation, “small for size” syndrome in liver surgery and transplantation, congenital liver disease and disorders, any other liver disorder or detect resulting from genetic diseases, degeneration, aging, drugs, or injuries.

32. The method of claim 30 or claim 31, wherein the disease or disorder is a bone disease or disorder, and the Wnt surrogate molecule binds Fzd1, Fzd2, and FZD7.

33. The method of claim 32, wherein the Wnt surrogate molecule also Fzd5 and Fzd8.

34. A method for treating a subject having a disease or disorder associated with increased or enhanced Wnt signaling, comprising administering to the subject an effective amount of the pharmaceutical composition of claim 26, wherein the isolated antibody, or antigen-binding fragment thereof is an inhibitor of a Wnt signaling pathway.

35. The method of claim 31, wherein the disease or disorder is selected from the group consisting of: tumors and cancers, degenerative disorders, fibrosis of any organ or tissue, idiopathic pulmonary fibrosis, kidney fibrosis, heart failure, coronary artery disease, osteoarthritis, heterotopic ossification, osteopetrosis, congenital high bone mass disorders.

36. An isolated antibody, or an antigen-binding fragment thereof, that binds one or more Frizzled receptor, where the antibody or antigen-binding fragment thereof bind:
(a) an epitope within a region of Frizzled 1 comprising or consisting of amino acid residues 115-230 or a corresponding region in Fzd2 or Fzd7;
(b) an epitope within a region of Frizzled 3 comprising or consisting of amino acid residues 29-78;
(c) an epitope within a region of Frizzled 4 comprising or consisting of amino acid residues 50-147;
(d) an epitope within a region of Frizzled 5 comprising or consisting of amino acid residues 37-149 or a corresponding region in Fzd1, Fzd2, Fzd7, or Fzd8;
(e) an epitope within a region of Frizzled 8 comprising or consisting of amino acid residue 55-137 or a corresponding region in Fzd5;
(f) an epitope within a region of Frizzled 9 comprising or consisting of amino acid residues 59-152 or a corresponding region in Fzd 10; or
(g) an epitope within a region of Frizzled 10 comprising or consisting of amino acid residues 35-124.

37. An isolated antibody, or an antigen-binding fragment thereof, that binds one or more Frizzled receptor, wherein the antibody or antigen-binding fragment thereof contacts the Frizzled receptor with a distance of less than 5 angstroms at any of the sets of amino acid residues indicated in Table 3.
